(19) United States
(12) Patent Application Publication
(10) Pub. No.: US 2005/0272064 A1
(43) Pub. Date: Dec. 8, 2005

(54) Halohydrin dehalogenases and related polynucleotides

(75) Inventors: S. Christopher Davis, San Francisco, CA (US); Richard John Fox, Kirkwood, MO (US); Gjalt W. Huisman, San Carlos, CA (US); Vesna Gavrilovic, Mountain View, CA (US); Lisa Marie Newman, Redwood City, CA (US)

Correspondence Address: MCANDREWS HELD & MALLOY, LTD, 500 WEST MADISON STREET, SUITE 3400, CHICAGO, IL, 60661, US

(73) Assignee: Codexis, Inc.

(21) Appl. No.: 11/067,323

(22) Filed: Feb. 23, 2005

Related U.S. Application Data
(63) Continuation-in-part of application No. 10/917,179, filed on Aug. 11, 2004.
(60) Provisional application No. 60/494,382, filed on Aug. 11, 2003.
(60) Provisional application No. 60/546,033, filed on Feb. 18, 2004.

(51) Int. Cl. C12Q 1/68; C07H 21/04; C12N 9/04; C12N 1/21; C12N 15/74

(52) U.S. Cl. 435/6; 435/69.1; 435/190; 435/252.3; 435/471; 536/23.2

(57) ABSTRACT

The present invention relates to novel halohydrin dehalogenase polypeptides and the polynucleotides that encode them. These polypeptides are useful in the production of 4-substituted-3-butyric acid derivatives and vicinal cyano, hydroxyl substituted carboxylic acid esters. The invention also provides related vectors, host cells and methods.

[0001] This application is a continuation-in-part (CIP) of U.S. Ser. No. 10/917,179. filed Aug. 11, 2004, now pending, which is related to U.S. Ser. No. 60/546,033, filed Feb. 18, 2004, and U.S. Ser. No. 60/494,382, filed Aug. 11, 2003.

### FIELD OF THE INVENTION

[0002] The present invention relates to novel halohydrin dehalogenase polypeptides and the polynucleotides that encode them.

### BACKGROUND OF THE INVENTION

[0003] Halohydrin dehalogenase (“HHDH”), also named halohydrin hydrogen-halide-lyase or halohydrin epoxidase, [EC4.5.1] catalyzes the interconversion of 1,2-halohydrins and the corresponding 1,2-epoxides: [chemical structure]
U.S. Pat. No. 4,284,723 describes the use of a halohydrin epoxidase for the production of propylene oxide. U.S. Pat. Nos. 5,166,061 and 5,210,031 describe the use of this enzyme activity for the conversion of 1,3-dichloropropanol (DCP) and epichlorohydrin (ECH) respectively to 4-chloro-3-hydroxybutyronitrile (CHBN). HHDH enzymes from Agrobacterium radiobacter and Corynebacterium have been characterized on a broad range of halogenated substrates (Van Hylckama Vlieg et al., J. Bacteriol. (2001) 183:5058-5066; Nakamura et al., Appl. Environ. Microbiol. (1994) 60:1297-1301; Nagasawa et al., Appl. Microbiol. Biotechnol. (1992) 36:478-482).

[0004] HHDH also catalyzes the ring opening of epoxides with nucleophiles other than chloride or bromide. It has been demonstrated that azide (N₃⁻), nitrite (NO₂⁻) and cyanide (CN⁻) can replace chloride in the opening of epoxides (see Nakamura et al., Biochem. Biophys Res. Comm. (1991) 180:124-130; Nakamura et al., Tetrahedron (1994) 50: 11821-11826; Lutje Spelberg et al., Org. Lett. (2001) 3:41-43; Lutje Spelberg et al., Tetrahedron Assym. (2002) 13:1083): [chemical structure]
Nakamura et al. (Tetrahedron (1994) 50: 11821-11826) describe the use of HHDH for the direct conversion of DCP to chloro-3-hydroxy-butyronitrile (CHBN) through epichlorohydrin (ECH) as the intermediate:

[chemical structure]

[0005] Some halohydrin dehalogenases have been characterized. For example, HHDH from A. radiobacter AD1 is a homotetramer of 28 kD subunits. Corynebacterium sp. N-1074 produces two HHDH enzymes, one of which is composed of 28 kD subunits (Ia), while the other is composed of related subunits of 35 and/or 32 kD (Ib). HHDH from some sources is easily inactivated under oxidizing conditions in a process that leads to dissociation of the subunits, has a pH optimum from pH 8 to 9 and an optimal temperature of 50° C. (Tang, Enz. Microbial Technol. (2002) 30:251-258; Swanson, Curr. Opin. Biotechnol. (1999) 10:365-369). The optimal pH for HHDH catalyzed epoxide formation has been reported as 8.0 to 9.0 and the optimal temperature in the range of from 45° C. to 55° C. (Van Hylckama Vlieg et al., J. Bacteriol. (2001) 183:5058-5066; Nakamura et al., Appl. Environ. Microbiol. (1994) 60:1297-1301; Nagasawa et al., Appl. Microbiol. Biotechnol. (1992) 36:478-482). The optimal pH for the reverse reaction, ring opening by chloride, has been reported for the two Corynebacterium sp. N-1074 enzymes and is 7.4 (Ia) or 5 (Ib). Site directed mutagenesis studies on the A. radiobacter AD1 HHDH indicated that oxidative inactivation is due to disruption of the quartenary structure of the enzyme by oxidation of cysteine residues (Tang et al., Enz. Microbial Technol. (2002) 30:251-258).

[0006] Purified HHDH enzymes from different sources exhibit specific activities on DCP ranging from 146 U/mg (Ib) to 2.75 U/mg (Ia) (Nakamura et al., Appl. Environ. Microbiol. 1994 60:1297-1301; Nagasawa et al., Appl. Microbiol. Biotechnol. (1992) 36:478-482). The high activity of the lb enzyme is accompanied by a high enantioselectivity to produce R-ECH from DCP, while the Ia enzyme produces racemic ECH.

[0007] HHDH encoding genes have been identified in Agrobacterium radiobacter AD1 (hheC), Agrobacterium tumefaciens (halB), Corynebacterium sp (hheA encoding Ia and hheB encoding Ib), Arthrobacter sp. (hheA_{AD2}), and Mycobacterium sp. GP1 (hheB_{GP1}). All enzymes have been functionally expressed in E. coli.

[0008] It is highly desirable for commercial applications of HHDH that the enzyme exhibits high volumetric productivity, that reactions run to completion in a relatively short period of time, with a high final product concentration, with high enanantioselectivity, and that no chemical side products are formed. These characteristics of a process can generally be used to define the broad characteristics of the enzyme: low Km for the substrate(s), high process stability, high specific activity, no substrate and product inhibition under conditions where chemical reactions are not proceeding. Currently available HHDH enzymes do not fulfill all of these criteria. For instance, the conversion on 1,2-epoxybutane and cyanide to 3-hydroxyvaleronitrile by HHDH proceeds at a maximum rate of 3 mmol/hr and this rate is sustained for only 10 minutes (Nakamura et al., Biochem. Biophys Res. Comm. (1991) 180:124-130). Conversion of DCP and ECH to 4-chloro-3-hydroxybutyro-nitrile (CHBN) is also limited to rates of 2-3 mmol/hr (Nakamura, U.S. Pat. Nos. 5,166,061 and 5,210,031). An in depth analysis of the ECH to CHBN conversion reveals that while the hheB encoded HHDH-Ib enzyme has high activity, high productivity is maintained for only 20 min after which further conversion occurs at a rate that is at least 50-fold slower, with the overall conversion at just over 60% (Nakamura et al. Tetrahedron (1994) 50: 11821-11826). The direct conversion of DCP, via ECH to CHBN proceeds at a reduced rate and results in a 65.3% yield. Thus, HHDH as described in the literature does not meet the desired criteria for a catalyst in commercial applications.

[0009] Accordingly, new halohydrin dehalogenases would be highly desirable.

### BRIEF SUMMARY OF THE INVENTION

[0010] The present invention has multiple aspects. In its first aspect, it is directed to an isolated (typically recombinant) polypeptide having improved HHDH enzymatic activity relative to the wild-type HHDH of SEQ ID NO: 2. Specifically, the present invention is directed an isolated (typically recombinant) polypeptide wherein the polypeptide comprises an amino acid sequence that is at least 90% identical to SEQ ID NO: 730, preferably at least 95% identical, more preferably at least 97% identical, even more preferably at least 98% identical, and most preferably at least 99% identical to SEQ ID NO: 730.

[0011] In another embodiment, the present invention is directed to the polypeptide of SEQ ID NO: 730 having one or more residue substitutions selected from the group consisting of M54I, D99G, T100M, K121R, P135S, S146A, W238T, and W251E.

[0012] In yet another embodiment, the present invention is directed to an isolated or recombinant polypeptide having HHDH activity, wherein the polypeptide comprises an amino acid sequence that is selected from the group consisting of:
[0013] (a) an amino acid sequence that is at least 80% identical to SEQ ID NO: 730 (typically at least 85% identical, more typically at least 90% identical, preferably at least 95% identical, more preferably at least 97% identical, even more preferably at least 98% identical, and most preferably at least 99% identical to SEQ ID NO: 730) and has one or more amino acid residues selected from the group consisting of Q at position 38, I at position 54, T at position 67, G at position 99, M at position 100, R at position 121, S at position 135, A at position 146, T at position 238, and E at position 251;
[0014] (b) an amino acid sequence encoded by a nucleic acid that hybridizes under stringent conditions over substantially the entire length of a nucleic acid corresponding to SEQ ID NO: 729, and wherein the encoded polypeptide, when optimally aligned with SEQ ID NO: 730, comprises an amino acid sequence having at least one amino acid residue selected from the group consisting of Q at position 38, I at position 54, T at position 67, G at position 99, M at position 100, R at position 121, S at position 135, A at position 146, T at position 238, and E at position 251.

[0015] In another embodiment, the polypeptide of the preceding paragraph has one or more amino acid residues selected from the group consisting of I at position 54, G at position 99, M at position 100, Rat position 121, S at position 135, A at position 146, T at position 238, and E at position 251.

[0016] In another aspect, the present invention is directed to an isolated (typically recombinant) polypeptide having HHDH activity, wherein the polypeptide comprises an amino acid sequence that is at least 86% identical to SEQ ID NO: 750, typically at least 90% identical, preferably at least 95% identical, more preferably at least 97% identical, even more preferably at least 98% identical, and most preferably at least 99% identical to SEQ ID NO: 750.

[0017] In another embodiment, the present invention is directed to an isolated (typically recombinant) polypeptide having HHDH activity, wherein the polypeptide comprises an amino acid sequence selected from the group consisting of:
[0018] (a) an amino acid sequence that is at least 80% identical to SEQ ID NO: 750 (typically at least 85% identical, more typically at least 90% identical, preferably at least 95% identical, more preferably at least 97% identical, even more preferably at least 98% identical, and most preferably at least 99% identical to SEQ ID NO: 750) and that has one or more amino acid residues selected from the group consisting of A at position 27, Q at position 38, Q at position 46, I at position 54, V at position 60, V at position 65, T at position 67, S at position 87, R at position 91, A at position 95, E at position 96, G at position 99, M or A or Q at position 100, R at position 117, S at position 118, E at position 121, S at position 135, S at position 144, A at position 146, T at position 152, N at position 153, M at position 178, N at position 179, N at position 182, V at position 190, A at position 199, Y at position 201, Y at position 205, L at position 236, T at position 238, and E or A at position 251; and
[0019] (b) an amino acid sequence encoded by a nucleic acid that hybridizes under stringent conditions over substantially the entire length of a nucleic acid corresponding to SEQ ID NO: 749, and wherein the encoded polypeptide, when optimally aligned with SEQ ID NO: 750, comprises an amino acid sequence having at least one amino acid residue selected from the group consisting of A at position 27, Q at position 38, Q at position 46, I at position 54, V at position 60, V at position 65, T at position 67, S at position 87, R at position 91, A at position 95, E at position 96, G at position 99, M or A or Q at position 100, R at position 117, S at position 118, E at position 121, S at position 135, S at position 144, A at position 146, T at position 152, N at position 153, M at position 178, N at position 179, N at position 182, V at position 190, A at position 199, Y at position 201, Y at position 205, L at position 236, T at position 238, and E or A at position 251.

[0020] In another embodiment of the immediately preceding paragraph, the at least one or more residues is selected from the group consisting of A at position 27, Q at position 46, I at position 54, V at position 60, S at position 87, R at position 91, A at position 95, E at position 96, G at position 99, M or A or Q at position 100, R at position 117, S at position 118, R at position 121, S at position 135, S at position 144, A at position 146, N at position 153, M at position 178, N at position 179, N at position 182, V at position 190, A at position 199, Y at position 201, L at position 236, Tat position 238, and E or A at position 251. This latter group does not include 38Q and 67T. In a first alternate embodiment, the one or more residues for above-described polypeptide (polypeptide X) is selected from the group consisting of V at position 60, R at position 91, E at position 96, A at position 100, R at position 117, S at position 118, N at position 153, M at position 178, N at position 179, N at position 182, V at position 190, and A at position 251. Within the scope of this embodiment, a preferred polypeptide is a polypeptide of SEQ ID NO: 750 having HHDH enzymatic activity and having one or more of the following residue substitutions: A60V, K91R, D96E, T100A, S117R, Q118S, S153N, L178M, H179N, D182N, E190V and G251A.

[0021] In a second alternate embodiment, the one or more residues for above-described polypeptide (polypeptide X) is selected from the group consisting of A at position 27, Q at position 46, S at position 87, A at position 95, Q at position 100, S at position 144, A at position 199, Y at position 201, and L at position 236. Within the scope of this embodiment, a preferred polypeptide is a polypeptide of SEQ ID NO: 750 having HHDH enzymatic activity and having one or more of the following residue substitutions: T27A, E46Q, R87S, E95A, T100Q, T144S, V199A, H201Y and V236L.

[0022] In a third alternative embodiment, the one or more amino acid residues of the above described polypeptide (polypeptide X) are selected from the group consisting of V at position 65, G at position 99, M at position 100, E at position 121, T at position 152, Y at position 205, and T at position 238.

[0023] In yet another embodiment, the present invention is directed to a polypeptide having HHDH enzymatic activity and having an amino acid sequence is at least 80% identical to SEQ ID NO: 750 (typically at least 85% identical, more typically at least 90% identical, preferably at least 95% identical, more preferably at least 97% identical, even more preferably at least 98% identical, and most preferably at least 99% identical to SEQ ID NO: 750) and comprises two or more residues selected from the group consisting of A at position 27, Q at position 46, I at position 54, V at position 60, V at position 65, T at position 67, S at position 87, R at position 91, A at position 95, E at position 96, G at position 99, M or A or Q at position 100, R at position 117, S at position 118, E at position 121, S at position 135, S at position 144, A at position 146, T at position 152, N at position 153, M at position 178, N at position 179, N at position 182, V at position 190, A at position 199, Y at position 201, Y at position 205, L at position 236, T at position 238, and E or A at position 251.

[0024] In another embodiment, the present invention is directed to an isolated (typically recombinant) polypeptide having HHDH activity, wherein the polypeptide comprises an amino acid sequence selected from the group consisting of:
[0025] (a) an amino acid sequence that is at least 80% identical to SEQ ID NO: 750 (typically at least 85% identical, more typically at least 90% identical, preferably at least 95% identical, more preferably at least 97% identical, even more preferably at least 98% identical, and most preferably at least 99% identical to SEQ ID NO: 750) and that has two or more residues are selected from the group consisting of A at position 27, Q at position 46, I at position 54, V at position 60, V at position 65, T at position 67, S at position 87, R at position 91, A at position 95, E at position 96, G at position 99, M or A or Q at position 100, R at position 117, S at position 118, E at position 121, S at position 135, S at position 144, A at position 146, T at position 152, N at position 153, M at position 178, N at position 179, N at position 182, V at position 190, A at position 199, Y at position 201, Y at position 205, L at position 236, T at position 238, and E or A at position 251; and
[0026] (b) an amino acid sequence encoded by a nucleic acid that hybridizes under stringent conditions over substantially the entire length of a nucleic acid corresponding to SEQ ID NO: 749, and wherein the encoded polypeptide, when optimally aligned with SEQ ID NO: 750, comprises an amino acid sequence having at least one amino acid residue selected from the group consisting of A at position 27, Q at position 46, I at position 54, V at position 60, V at position 65, T at position 67, S at position 87, R at position 91, A at position 95, E at position 96, G at position 99, M or A or Q at position 100, R at position 117, S at position 118, E at position 121, S at position 135, S at position 144, A at position 146, T at position 152, N at position 153, M at position 178, N at position 179, N at position 182, V at position 190, A at position 199, Y at position 201, Y at position 205, L at position 236, T at position 238, and E or A at position 251. In a more preferred embodiment, the “two or more residues” are three or more residues. In an even more preferred embodiment, the three or more residues are the following three residues: R at position 121, S at position 135, and A at position 146.

[0027] The present invention is also directed to an isolated (typically recombinant) polypeptide having HHDH activity, wherein the polypeptide is at least 97% identical to SEQ ID NO: 750, preferably at least 98% identical, more preferably at least 99% identical. In another embodiment, the present invention is also directed to an isolated (typically recombinant) polypeptide having HHDH activity, wherein the polypeptide is at least 97% identical to SEQ ID NO: 750, and wherein the amino acid sequence of the polypeptide comprises one or more amino acid residue selected from the group consisting of A at position 27, Q at position 38, Q at position 46, I at position 54, V at position 60, V at position 65, T at position 67, S at position 87, R at position 91, A at position 95, E at position 96, G at position 99, M or A or Q at position 100, R at position 117, S at position 118, R or E at position 121, S at position 135, S at position 144, A at position 146, T at position 152, N at position 153, M at position 178, N at position 179, N at position 182, V at position 190, A at position 199, Y at position 201, Y at position 205, L at position 236, T at position 238, and E or A at position 251.

[0028] In another aspect, the present invention is directed to polynucleotides that encode for the above identified polypeptides. Specifically, the present invention is directed to an isolated polynucleotide encoding a polypeptide having HHDH activity, wherein the polypeptide comprises an amino acid sequence that is at least 90% identical to SEQ ID NO: 730, preferably at least 95% identical, more preferably at least 97% identical, even more preferably at least 98% identical, and most preferably at least 99% identical to SEQ ID NO: 730.

[0029] In another embodiment, the present invention is directed to a polynucleotide encoding the polypeptide of SEQ ID NO: 730 having one or more residue substitutions selected from the group consisting of M541, D99G, T100M, K121R, P135S, S146A, W238T, and W251E.

[0030] In yet another embodiment, the present invention is directed to a polynucleotide encoding an isolated or recombinant polypeptide having HHDH activity, wherein the polypeptide comprises an amino acid sequence that is selected from the group consisting of:
[0031] (a) an amino acid sequence that is at least 80% identical to SEQ ID NO: 730 (typically at least 85% identical, more typically at least 90% identical, preferably at least 95% identical, more preferably at least 97% identical, even more preferably at least 98% identical, and most preferably at least 99% identical to SEQ ID NO: 730) and has one or more amino acid residues selected from the group consisting of Q at position 38, I at position 54, T at position 67, G at position 99, M at position 100, R at position 121, S at position 135, A at position 146, T at position 238, and E at position 251;
[0032] (b) an amino acid sequence encoded by a nucleic acid that hybridizes under stringent conditions over substantially the entire length of a nucleic acid corresponding to SEQ ID NO: 729, and wherein the encoded polypeptide, when optimally aligned with SEQ ID NO: 730, comprises an amino acid sequence having at least one amino acid residue selected from the group consisting of Q at position 38, I at position 54, T at position 67, G at position 99, M at position 100, R at position 121, S at position 135, A at position 146, T at position 238, and E at position 251.

[0033] In another embodiment, the encoded polypeptide of the preceding paragraph has one or more amino acid residues selected from the group consisting of I at position 54, G at position 99, M at position 100, R at position 121, S at position 135, A at position 146, T at position 238, and E at position 251.

[0034] In another aspect, the present invention is directed to an isolated polynucleotide encoding a polypeptide having HHDH activity, wherein the polypeptide comprises an amino acid sequence that is at least 86% identical to SEQ ID NO: 750, typically at least 90% identical, preferably at least 95% identical, more preferably at least 97% identical, even more preferably at least 98% identical, and most preferably at least 99% identical to SEQ ID NO: 750.

[0035] In another embodiment, the present invention is directed to an isolated polynucleotide encoding a polypeptide (designated as polypeptide X for this embodiment) having HHDH activity, wherein the polypeptide comprises an amino acid sequence selected from the group consisting of:
[0036] (a) an amino acid sequence that is at least 80% identical to SEQ ID NO: 750 (typically at least 85% identical, more typically at least 90% identical, preferably at least 95% identical, more preferably at least 97% identical, even more preferably at least 98% identical, and most preferably at least 99% identical to SEQ ID NO: 750) and that has one or more amino acid residues selected from the group consisting of A at position 27, Q at position 38, Q at position 46, I at position 54, V at position 60, V at position 65, T at position 67, S at position 87, R at position 91, A at position 95, E at position 96, G at position 99, M or A or Q at position 100, R at position 117, S at position 118, E at position 121, S at position 135, S at position 144, A at position 146, T at position 152, N at position 153, M at position 178, N at position 179, N at position 182, V at position 190, A at position 199, Y at position 201, Y at position 205, L at position 236, Tat position 238, and E or A at position 251; and
[0037] (b) an amino acid sequence encoded by a nucleic acid that hybridizes under stringent conditions over substantially the entire length of a nucleic acid corresponding to SEQ ID NO: 749, and wherein the encoded polypeptide, when optimally aligned with SEQ ID NO: 750, comprises an amino acid sequence having at least one amino acid residue selected from the group consisting of A at position 27, Q at position 38, Q at position 46, I at position 54, V at position 60, V at position 65, T at position 67, S at position 87, R at position 91, A at position 95, E at position 96, G at position 99, M or A or Q at position 100, R at position 117, S at position 118, E at position 121, S at position 135, S at position 144, A at position 146, T at position 152, N at position 153, M at position 178, N at position 179, N at position 182, V at position 190, A at position 199, Y at position 201, Y at position 205, L at position 236, T at position 238, and E or A at position 251.

[0038] In another embodiment of the polynucleotide of the immediately preceding paragraph, wherein the at least one or more residues is selected from the group consisting of A at position 27, Q at position 46, I at position 54, V at position 60, S at position 87, R at position 91, A at position 95, E at position 96, G at position 99, M or A or Q at position 100, R at position 117, S at position 118, R at position 121, S at position 135, S at position 144, A at position 146, N at position 153, M at position 178, N at position 179, N at position 182, V at position 190, A at position 199, Y at position 201, L at position 236, T at position 238, and E or A at position 251. This latter group does not include 38Q and 67T. In a first alternate embodiment, the one or more residues for above-described encoded polypeptide (polypeptide X) is selected from the group consisting of V at position 60, R at position 91, E at position 96, A at position 100, R at position 117, S at position 118, N at position 153, M at position 178, N at position 179, N at position 182, V at position 190, and A at position 251. Within the scope of this embodiment, a preferred polynucleotide is an isolated polynucleotide encoding a polypeptide of SEQ ID NO: 750 having HHDH enzymatic activity and having one or more of the following residue substitutions: A60V, K91R, D96E, T100A, S17R, Q118S, S153N, L178M, H179N, D182N, E190V and G251A.

[0039] In a second alternate embodiment, the one or more residues for above-described encoded polypeptide (polypeptide X) is selected from the group consisting of A at position 27, Q at position 46, S at position 87, A at position 95, Q at position 100, S at position 144, A at position 199, Y at position 201, and L at position 236. Within the scope of this embodiment, a preferred polynucleotide is an isolated polynucleotide encoding a polypeptide of SEQ ID NO: 750 having HHDH enzymatic activity and having one or more of the following residue substitutions: T27A, E46Q, R87S, E95A, T100Q, T144S, V199A, H201Y and V236L. In a third alternative embodiment, the one or more amino acid residues of the above described encoded polypeptide (polypeptide X) are selected from the group consisting of V at position 65, G at position 99, M at position 100, E at position 121, T at position 152, Y at position 205, and T at position 238.

[0040] In yet another embodiment of the above described polynucleotide, the encoded amino acid sequence is at least 80% identical to SEQ ID NO: 750 (typically at least 85% identical, more typically at least 90% identical, preferably at least 95% identical, more preferably at least 97% identical, even more preferably at least 98% identical, and most preferably at least 99% identical to SEQ ID NO: 750) and comprises two or more residues selected from the group consisting of A at position 27, Q at position 46, I at position 54, V at position 60, S at position 87, R at position 91, A at position 95, E at position 96, G at position 99, M or A or Q at position 100, R at position 117, S at position 118, R at position 121, S at position 135, S at position 144, A at position 146, N at position 153, M at position 178, N at position 179, N at position 182, V at position 190, A at position 199, Y at position 201, L at position 236, T at position 238, and E or A at position 251.

[0041] In another embodiment, the present invention is directed to an isolated polynucleotide encoding a polypeptide having HHDH activity, wherein the polypeptide comprises an amino acid sequence selected from the group consisting of:
[0042] (a) an amino acid sequence that is at least 80% identical to SEQ ID NO: 750 (typically at least 85% identical, more typically at least 90% identical, preferably at least 95% identical, more preferably at least 97% identical, even more preferably at least 98% identical, and most preferably at least 99% identical to SEQ ID NO: 750) and that has two or more residues are selected from the group consisting of A at position 27, Q at position 46, I at position 54, V at position 60, V at position 65, T at position 67, S at position 87, R at position 91, A at position 95, E at position 96, G at position 99, M or A or Q at position 100, R at position 117, S at position 118, E at position 121, S at position 135, S at position 144, A at position 146, T at position 152, N at position 153, M at position 178, N at position 179, N at position 182, V at position 190, A at position 199, Y at position 201, Y at position 205, L at position 236, T at position 238, and E or A at position 251; and
[0043] (b) an amino acid sequence encoded by a nucleic acid that hybridizes under stringent conditions over substantially the entire length of a nucleic acid corresponding to SEQ ID NO: 749, and wherein the encoded polypeptide, when optimally aligned with SEQ ID NO: 750, comprises an amino acid sequence having at least one amino acid residue selected from the group consisting of A at position 27, Q at position 46, I at position 54, V at position 60, V at position 65, T at position 67, S at position 87, R at position 91, A at position 95, E at position 96, G at position 99, M or A or Q at position 100, R at position 117, S at position 118, E at position 121, S at position 135, S at position 144, A at position 146, T at position 152, N at position 153, M at position 178, N at position 179, N at position 182, V at position 190, A at position 199, Y at position 201, Y at position 205, L at position 236, T at position 238, and E or A at position 251. In a more preferred embodiment, the “two or more residues” are three or more residues. In an even more preferred embodiment, the three or more residues are the following three residues: R at position 121, S at position 135, and A at position 146.

[0044] The present invention is also directed to an isolated polynucleotide encoding a polypeptide having HHDH activity, wherein the polypeptide is at least 97% identical to SEQ ID NO: 750, preferably at least 98% identical, more preferably at least 99% identical. In another embodiment, the present invention is also directed to an isolated (typically recombinant) polypeptide having HHDH activity, wherein the polypeptide is at least 97% identical to SEQ ID NO: 750, and wherein the amino acid sequence of the polypeptide comprises one or more amino acid residue selected from the group consisting of A at position 27, Q at position 38, Q at position 46, I at position 54, V at position 60, T at position 67, S at position 87, R at position 91, A at position 95, E at position 96, G at position 99, M or A or Q at position 100, R at position 117, S at position 118, Rat position 121, S at position 135, S at position 144, A at position 146, N at position 153, M at position 178, N at position 179, N at position 182, V at position 190, A at position 199, Y at position 201, L at position 236, T at position 238, and E or A at position 251.

[0045] In a third aspect, the present invention is directed to a host cell comprising any polynucleotide of the present invention as described above. Typically, the polynucleotide is operatively connected to one or more promoters and/or enhancers that provide for expression of the polynucleotide in the host cell.

[0046] In its fourth aspect, the present invention is directed to a method of making a polypeptide having enhanced HHDH enzymatic activity, comprising
[0047] (a) transforming a host cell with any one of the above described polynucleotides of the present invention;
[0048] (b) culturing the transformed host cell in a culture medium under conditions that cause said polynucleotide to express the encoded HHDH polypeptide; and
[0049] (c) isolating the expressed HHDH polypeptide from the culture medium or from the transformed and cultured host cells.

[0050] In other aspects, the present invention is directed to a polypeptide, typically an isolated and optionally purified polypeptide (more typically, a recombinant polypeptide) having halohydrin dehalogenase activity, wherein the polypeptide comprises an amino acid sequence selected from the group consisting of:
[0051] (a) a polypeptide having an amino acid sequence that is at least 99% identical to SEQ ID NO: 4, 12, 16, 18, 34, 38, 44, 48, 52, 66, 80, 84, 114, 154, 158, 170, or 270;
[0052] (b) a polypeptide having an amino acid sequence that is at least 98% identical to SEQ ID NO: 10, 14, 68, 118, 164, 166, or 180;
[0053] (c) a polypeptide having an amino acid sequence that is at least 97% identical to SEQ ID NO: 110, 162, 262, 422, 440 or 520;
[0054] (d) a polypeptide having an amino acid sequence that is at least 96% identical to SEQ ID NO: 116 or 448;
[0055] (e) a polypeptide having an amino acid sequence that is at least 95% identical to SEQ ID NO: 264, 266, 470 or 476;
[0056] (f) a polypeptide having an amino acid sequence that is at least 93% identical to SEQ ID NO: 200;
[0057] (g) a polypeptide having an amino acid sequence that is at least 89% identical to SEQ ID NO: 442;
[0058] (h) a polypeptide having an amino acid sequence that is at least 88% identical to SEQ ID NO: 702;
[0059] (i) a polypeptide that is at least 80% identical to SEQ ID NO: 2, when optimally aligned with SEQ ID NO: 2, and which comprises at least one amino acid residue selected from the group consisting of T at (residue) position 2, A or P or S at position 3, V at position 4, D at position 6, either I or F at position 9, L at position 10, S at position 13, S at position 14, K at position 15, C at position 16, T or R at position 17, either C or S or K at position 20, T at position 24, Q at position 26, F at position 28, T at position 29, A at position 30, L at position 31, G at position 33, R at position 34, L at position 35, N at position 36, H at position 37, D at position 40, L at position 44, P at position 45, either P or A at position 47, N at position 52, V at position 54, R at position 55, D at position 56, K at position 58, G or D at position 61, V at position 63, R at position 72, I at position 75, P at position 76, C at position 78, Y at position 82, either S or L at position 84, A at position 85, E at position 91, D at position 93, Q or G at position 95, N at position 96, K at position 107, A at position 112, either T, S or G at position 114, A at position 115, P at position 117, N at position 120, E at position 121, P at position 122, R at position 126, V at position 130, S at position 133, A or V at position 134, L, W or V at position 136, H at position 139, I or R at position 142, S at position 144, S at position 146, T at position 152, S at position 153, either S or A at position 154, V at position 168, T at position 169, F at position 177, V at position 178, I at position 180, G or I at position 181, K at position 184, Y at position 186, L at position 194, N at position 198, M at position 199, E at position 215, G at position 236, V at position 237, L at position 238, T at position 240, either I or A or V at position 245, Y at position 249, V or I at position 252, and V at position 254; 0) a polypeptide encoded by a nucleic acid that hybridizes under stringent conditions over substantially the entire length of a nucleic acid corresponding to SEQ ID NO: 1, and wherein the encoded polypeptide, when optimally aligned with SEQ ID NO: 2, comprises an amino acid sequence having at least one amino acid residue selected from the group consisting of T at (residue) position 2, A, P or S at position 3, V at position 4, D at position 6, either I or F at position 9, L at position 10, S at position 13, S at position 14, K at position 15, C at position 16, T or R at position 17, either S or K or C at position 20, T at position 24, Q at position 26, F at position 28, T at position 29, A at position 30, L at position 31, G at position 33, R at position 34, L at position 35, N at position 36, H at position 37, D at position 40, L at position 44, P at position 45, either P or A at position 47, N at position 52, V at position 54, R at position 55, D at position 56, K at position 58, G or D at position 61, V at position 63, R or Q at position 72, I at position 75, P at position 76, C at position 78, Y at position 82, either S or L at position 84, A at position 85, E at position 91, D at position 93, Q or G at position 95, N at position 96, G at position 99, K at position 107, A at position 112, either T, G or S at position 114, A at position 115, P at position 117, N at position 120, E at position 121, P at position 122, R at position 126, V at position 130, S at position 133, A or V at position 134, L, W or V at position 136, H at position 139, I or R at position 142, S at position 144, S at position 146, T at position 152, S at position 153, either S or A at position 154, V at position 168, T at position 169, F at position 177, V at position 178, I at position 180, G at position 181, K at position 184, Y at position 186, T at position 189, L at position 194, N at position 198, M at position 199, E at position 215, A at position 222, G at position 236, V at position 237, L at position 238, T at position 240, either I or A or V at position 245, V or I at position 252, and V at position 254.

[0060] In another aspect, the present invention is directed to a polypeptide, typically an isolated and optionally purified polypeptide (more typically, a recombinant polypeptide) having HHDH, wherein the polypeptide comprises an amino acid sequence selected from the group consisting of (a), (b), (c), (d), (e), (f), (g), (h), (i) and 0) as described above, and further comprises an amino acid residue selected from the group consisting of Q at position 37, Y at position 70, Q at position 72, Q at position 80, G at position 99, R at position 107, T at position 146, C at position 153, F at position 186, T at position 189, and A at position 222.

[0061] In another aspect, the present invention is directed to halohydrin dehalogenases (HHDH) having from 1.4 fold to 10,000 fold greater activity as compared to wild-type halohydrin dehalogenase from Agrobacterium sp. (SEQ ID NO: 2).

[0062] In a further aspect, the present invention is directed to an isolated or recombinant polypeptide having at least 1.4 fold greater (typically 1.4 fold to 10,000 fold greater, more typically 1.4 fold to 1000 fold greater) HHDH activity as compared to wild-type HHDH having the amino acid sequence of SEQ ID NO: 2, and
[0063] wherein the polypeptide is encoded by a nucleic acid that hybridizes under stringent conditions over substantially the entire length of a nucleic acid having a sequence selected from the group consisting of SEQ ID NO: 3, 9, 11, 13, 15, 17, 33, 37, 43, 47, 49, 51, 65, 67, 79, 83, 109, 113, 115, 117, 153, 157, 161, 163, 165, 169, 179, 191, 199, 261, 263, 265, 269, 421, 439, 441, 447, 469, 475, 519, 701, 725, 729, 731, 733, 735, 737, 743, 745, 747, 749 and complementary sequences thereof.

[0064] In yet another embodiment, the present invention is directed to an isolated or recombinant polypeptide having at least 1.4 fold greater HHDH activity as compared to wild-type HHDH having the amino acid sequence of SEQ ID NO: 2,
[0065] wherein the polypeptide has an amino acid sequence selected from the group consisting of SEQ ID NO: 4, 10, 12, 14, 16, 18, 34, 38, 44, 48, 50, 52, 66, 68, 80, 84, 110, 114, 116, 118, 154, 158, 162, 164, 166, 170, 180, 191, 200, 262, 264, 266, 270, 422, 440, 442, 448, 470, 476, 520, 702, 726, 730, 732, 734, 736, 738, 744, 746, 748 and 750.

[0066] In another aspect, the present invention is directed to HHDH polynucleotides that encode polypeptides having halohydrin dehalogenase activity.

[0067] In a still further aspect, the present invention is directed to a vector comprising an HHDH polynucleotide of the present invention operatively linked to a promoter.

[0068] In other embodiments, the present invention is directed to host cells and methods for producing HHDH polypeptides of the present invention from such host cells.

### BRIEF DESCRIPTION OF THE FIGURES

[0069] FIG. 1 is a 3944 bp expression vector (PCK110700) of the present invention comprising a p15A origin of replication (P15A ori), a lacI repressor, a T5 promoter, a T7 ribosomal binding site (T7g10), and a chloramphenicol resistance gene (camR).

[0070] FIG. 2 depicts the percent conversion vs. time for the reactions of ethyl (S)-4-chloro-3-hydroxybutyrate with aqueous hydrocyanic acid in the presence of various halohydrin dehalogenase enzymes that are described in Examples 8 through 12.

### DETAILED DESCRIPTION

HHDH Polypeptides

[0071] The present invention provides novel polypeptides having halohydrin dehalogenase (“HHDH”) activity, as well as the polynucleotides that encode them. The HHDH polypeptides of the present invention are suitable for catalyzing the conversion of 4-halo-3-hydroxybutyric acid derivatives to 4-substituted-3-hydroxybutyric acid derivatives, using, for example, the methods described in the patent application entitled, “Enzymatic Processes for the Production of 4-Substituted-3-Hydroxybutyric Acid Derivatives,” corresponding to Attorney Docket No. 0339.210US, filed on Aug. 11, 2003 and assigned U.S. Ser. No. 10/639,159, which is hereby incorporated herein by reference. These invention polypeptides are also suitable for catalyzing the conversion of vicinal halo, hydroxy substituted carboxylic acid esters to vicinal cyano, hydroxy substituted carboxylic acid esters using, for example the methods described in the patent application entitled, “Enzymatic Processes for the Production of 4-Substituted-3-Hydroxybutyric Acid Derivatives and Vicinal Cyano, Hydroxy Substituted Carboxylic Acid Esters,” corresponding to Attorney Docket No. 0339.310US, filed on Feb. 18, 2004 and assigned U.S. Ser. No. 10/782,258, which is hereby incorporated by reference. Polypeptides of the present invention are particularly useful as catalysts for converting halohydrins to cyanohydrins, which are useful as pharmaceutical intermediates. In a specific application, HHDH polypeptides of the present invention are used to catalyze the conversion of ethyl-4-chloro-3-hydroxybutyrate to ethyl-4-cyano-3-hydroxybutyrate. Examples illustrating such conversion are provided hereinbelow. A more detailed description of such uses is provided in the aforementioned patent applications entitled, “Enzymatic Processes for the Production of 4-Substituted-3-Hydroxybutyric Acid Derivatives” and “Enzymatic Processes for the Production of 4-Substituted-3-Hydroxybutyric Acid Derivatives and Vicinal Cyano, Hydroxy Substituted Carboxylic Acid Esters.” Id.

[0072] The present invention has multiple aspects. In its first aspect, it is directed to an isolated (typically recombinant) polypeptide having improved HHDH enzymatic activity relative to the wild-type HHDH of SEQ ID NO: 2. Specifically, the present invention is directed an isolated (typically recombinant) polypeptide wherein the polypeptide comprises an amino acid sequence that is at least 90% identical to SEQ ID NO: 730, preferably at least 95% identical, more preferably at least 97% identical, even more preferably at least 98% identical, and most preferably at least 99% identical to SEQ ID NO: 730.

[0073] In another embodiment, the present invention is directed to the polypeptide of SEQ ID NO: 730 having one or more residue substitutions selected from the group consisting of M541, D99G, T100M, K121R, P135S, S146A, W238T, and W251E.

[0074] In yet another embodiment, the present invention is directed to an isolated or recombinant polypeptide having HHDH activity, wherein the polypeptide comprises an amino acid sequence that is selected from the group consisting of:
[0075] (a) an amino acid sequence that is at least 80% identical to SEQ ID NO: 730 (typically at least 85% identical, more typically at least 90% identical, preferably at least 95% identical, more preferably at least 97% identical, even more preferably at least 98% identical, and most preferably at least 99% identical to SEQ ID NO: 730) and has one or more amino acid residues selected from the group consisting of Q at position 38, I at position 54, T at position 67, G at position 99, M at position 100, R at position 121, S at position 135, A at position 146, T at position 238, and E at position 251;
[0076] (b) an amino acid sequence encoded by a nucleic acid that hybridizes under stringent conditions over substantially the entire length of a nucleic acid corresponding to SEQ ID NO: 729, and wherein the encoded polypeptide, when optimally aligned with SEQ ID NO: 730, comprises an amino acid sequence having at least one amino acid residue selected from the group consisting of Q at position 38, I at position 54, T at position 67, G at position 99, M at position 100, R at position 121, S at position 135, A at position 146, T at position 238, and E at position 251.

[0077] In another embodiment, the polypeptide of the preceding paragraph has one or more amino acid residues selected from the group consisting of I at position 54, G at position 99, M at position 100, R at position 121, S at position 135, A at position 146, T at position 238, and E at position 251.

[0078] In another aspect, the present invention is directed to an isolated (typically recombinant) polypeptide having HHDH activity, wherein the polypeptide comprises an amino acid sequence that is at least 86% identical to SEQ ID NO: 750, typically at least 90% identical, preferably at least 95% identical, more preferably at least 97% identical, even more preferably at least 98% identical, and most preferably at least 99% identical to SEQ ID NO: 750.

[0079] In another embodiment, the present invention is directed to an isolated (typically recombinant) polypeptide (designated polypeptide X) having HHDH activity, wherein the polypeptide comprises an amino acid sequence selected from the group consisting of:
[0080] (a) an amino acid sequence that is at least 80% identical to SEQ ID NO: 750 (typically at least 85% identical, more typically at least 90% identical, preferably at least 95% identical, more preferably at least 97% identical, even more preferably at least 98% identical, and most preferably at least 99% identical to SEQ ID NO: 750) and that has one or more amino acid residues selected from the group consisting of A at position 27, Q at position 46, I at position 54, V at position 60, V at position 65, T at position 67, S at position 87, R at position 91, A at position 95, E at position 96, G at position 99, M or A or Q at position 100, R at position 117, S at position 118, E at position 121, S at position 135, S at position 144, A at position 146, Tat position 152, N at position 153, M at position 178, N at position 179, N at position 182, V at position 190, A at position 199, Y at position 201, Y at position 205, L at position 236, T at position 238, and E or A at position 251; and
[0081] (b) an amino acid sequence encoded by a nucleic acid that hybridizes under stringent conditions over substantially the entire length of a nucleic acid corresponding to SEQ ID NO: 749, and wherein the encoded polypeptide, when optimally aligned with SEQ ID NO: 750, comprises an amino acid sequence having at least one amino acid residue selected from the group consisting of A at position 27, Q at position 46, I at position 54, V at position 60, V at position 65, T at position 67, S at position 87, R at position 91, A at position 95, E at position 96, G at position 99, M or A or Q at position 100, R at position 117, S at position 118, E at position 121, S at position 135, S at position 144, A at position 146, T at position 152, N at position 153, M at position 178, N at position 179, N at position 182, V at position 190, A at position 199, Y at position 201, Y at position 205, L at position 236, T at position 238, and E or A at position 251.

[0082] In another embodiment of the immediately preceding paragraph, the at least one or more residues is selected from the group consisting of A at position 27, Q at position 46, I at position 54, V at position 60, S at position 87, R at position 91, A at position 95, E at position 96, G at position 99, M or A or Q at position 100, R at position 117, Sat position 118, Rat position 121, Sat position 135, Sat position 144, A at position 146, N at position 153, M at position 178, N at position 179, N at position 182, V at position 190, A at position 199, Y at position 201, L at position 236, T at position 238, and E or A at position 251. This latter group does not include 38Q and 67T. In a first alternate embodiment, the one or more residues for above-described polypeptide (polypeptide X) is selected from the group consisting of V at position 60, R at position 91, E at position 96, A at position 100, R at position 117, S at position 118, N at position 153, M at position 178, N at position 179, N at position 182, V at position 190, and A at position 251. Within the scope of this embodiment, a preferred polypeptide is a polypeptide of SEQ ID NO: 750 having HHDH enzymatic activity and having one or more of the following residue substitutions: A60V, K91R, D96E, T100A, S117R, Q118S, S153N, L178M, H179N, D182N, E190V and G251A.

[0083] In a second alternate embodiment, the one or more residues for above-described polypeptide (polypeptide X) is selected from the group consisting of A at position 27, Q at position 46, S at position 87, A at position 95, Q at position 100, S at position 144, A at position 199, Y at position 201, and L at position 236. Within the scope of this embodiment, a preferred polypeptide is a polypeptide of SEQ ID NO: 750 having HHDH enzymatic activity and having one or more of the following residue substitutions: T27A, E46Q, R87S, E95A, T100Q, T144S, V199A, H201Y and V236L.

[0084] In a third alternative embodiment, the one or more amino acid residues of the above described polypeptide (polypeptide X) are selected from the group consisting of V at position 65, G at position 99, M at position 100, E at position 121, T at position 152, Y at position 205, and T at position 238.

[0085] In yet another embodiment, the present invention is directed to a polypeptide having HHDH enzymatic activity and having an amino acid sequence is at least 80% identical to SEQ ID NO: 750 (typically at least 85% identical, more typically at least 90% identical, preferably at least 95% identical, more preferably at least 97% identical, even more preferably at least 98% identical, and most preferably at least 99% identical to SEQ ID NO: 750) and comprises two or more residues selected from the group consisting of A at position 27, Q at position 46, I at position 54, V at position 60, S at position 87, R at position 91, A at position 95, E at position 96, G at position 99, M or A or Q at position 100, R at position 117, S at position 118, R at position 121, S at position 135, S at position 144, A at position 146, N at position 153, M at position 178, N at position 179, N at position 182, V at position 190, A at position 199, Y at position 201, L at position 236, T at position 238, and E or A at position 251.

[0086] In another embodiment, the present invention is directed to an isolated (typically recombinant) polypeptide having HHDH activity, wherein the polypeptide comprises an amino acid sequence selected from the group consisting of:
[0087] (a) an amino acid sequence that is at least 80% identical to SEQ ID NO: 750 (typically at least 85% identical, more typically at least 90% identical, preferably at least 95% identical, more preferably at least 97% identical, even more preferably at least 98% identical, and most preferably at least 99% identical to SEQ ID NO: 750) and that has two or more residues are selected from the group consisting of A at position 27, Q at position 38, Q at position 46, I at position 54, V at position 60, T at position 67, S at position 87, R at position 91, A at position 95, E at position 96, G at position 99, M or A or Q at position 100, R at position 117, S at position 118, R at position 121, S at position 135, S at position 144, A at position 146, N at position 153, M at position 178, N at position 179, N at position 182, V at position 190, A at position 199, Y at position 201, L at position 236, T at position 238, and E or A at position 251; and
[0088] (b) an amino acid sequence encoded by a nucleic acid that hybridizes under stringent conditions over substantially the entire length of a nucleic acid corresponding to SEQ ID NO: 749, and wherein the encoded polypeptide, when optimally aligned with SEQ ID NO: 750, comprises an amino acid sequence having two or more residues are selected from the group consisting of A at position 27, Q at position 38, Q at position 46, I at position 54, V at position 60, T at position 67, S at position 87, R at position 91, A at position 95, E at position 96, G at position 99, M or A or Q at position 100, R at position 117, S at position 118, R at position 121, S at position 135, S at position 144, A at position 146, N at position 153, M at position 178, N at position 179, N at position 182, Vat position 190, A at position 199, Y at position 201, L at position 236, Tat position 238, and E or A at position 251. In a more preferred embodiment, the “two or more residues” are three or more residues. In an even more preferred embodiment, the three or more residues are the following three residues: R at position 121, S at position 135, and A at position 146.

[0089] The present invention is also directed to an isolated (typically recombinant) polypeptide having HHDH activity, wherein the polypeptide is at least 97% identical to SEQ ID NO: 750, preferably at least 98% identical, more preferably at least 99% identical. In another embodiment, the present invention is also directed to an isolated (typically recombinant) polypeptide having HHDH activity, wherein the polypeptide is at least 97% identical to SEQ ID NO: 750, and wherein the amino acid sequence of the polypeptide comprises one or more amino acid residue selected from the group consisting of A at position 27, Q at position 38, Q at position 46, I at position 54, V at position 60, T at position 67, S at position 87, R at position 91, A at position 95, E at position 96, G at position 99, M or A or Q at position 100, R at position 117, S at position 118, R at position 121, S at position 135, S at position 144, A at position 146, N at position 153, M at position 178, N at position 179, N at position 182, V at position 190, A at position 199, Y at position 201, L at position 236, T at position 238, and E or A at position 251.

[0090] In another aspect, the present invention is directed to polynucleotides that encode for the above identified polypeptides. Specifically, the present invention is directed to an isolated polynucleotide encoding a polypeptide having HHDH activity, wherein the polypeptide comprises an amino acid sequence that is at least 90% identical to SEQ ID NO: 730, preferably at least 95% identical, more preferably at least 97% identical, even more preferably at least 98% identical, and most preferably at least 99% identical to SEQ ID NO: 730.

[0091] In another embodiment, the present invention is directed to a polynucleotide encoding the polypeptide of SEQ ID NO: 730 having one or more residue substitutions selected from the group consisting of M541, D99G, T100M, K121R, P135S, S146A, W238T, and W251E.

[0092] In yet another embodiment, the present invention is directed to a polynucleotide encoding an isolated or recombinant polypeptide having HHDH activity, wherein the polypeptide comprises an amino acid sequence that is selected from the group consisting of:
[0093] (a) an amino acid sequence that is at least 80% identical to SEQ ID NO: 730 (typically at least 85% identical, more typically at least 90% identical, preferably at least 95% identical, more preferably at least 97% identical, even more preferably at least 98% identical, and most preferably at least 99% identical to SEQ ID NO: 730) and has one or more amino acid residues selected from the group consisting of Q at position 38, I at position 54, T at position 67, G at position 99, M at position 100, R at position 121, S at position 135, A at position 146, T at position 238, and E at position 251;
[0094] (b) an amino acid sequence encoded by a nucleic acid that hybridizes under stringent conditions over substantially the entire length of a nucleic acid corresponding to SEQ ID NO: 729, and wherein the encoded polypeptide, when optimally aligned with SEQ ID NO: 730, comprises an amino acid sequence having at least one amino acid residue selected from the group consisting of Q at position 38, I at position 54, T at position 67, G at position 99, M at position 100, R at position 121, S at position 135, A at position 146, T at position 238, and E at position 251.

[0095] In another embodiment, the encoded polypeptide of the preceding paragraph has one or more amino acid residues selected from the group consisting of I at position 54, G at position 99, M at position 100, R at position 121, S at position 135, A at position 146, T at position 238, and E at position 251.

[0096] In another aspect, the present invention is directed to an isolated polynucleotide encoding a polypeptide having HHDH activity, wherein the polypeptide comprises an amino acid sequence that is at least 86% identical to SEQ ID NO: 750, typically at least 90% identical, preferably at least 95% identical, more preferably at least 97% identical, even more preferably at least 98% identical, and most preferably at least 99% identical to SEQ ID NO: 750.

[0097] In another embodiment, the present invention is directed to an isolated polynucleotide encoding a polypeptide (polypeptide X in this embodiment) having HHDH activity, wherein the polypeptide comprises an amino acid sequence selected from the group consisting of:
[0098] (a) an amino acid sequence that is at least 80% identical to SEQ ID NO: 750 (typically at least 85% identical, more typically at least 90% identical, preferably at least 95% identical, more preferably at least 97% identical, even more preferably at least 98% identical, and most preferably at least 99% identical to SEQ ID NO: 750) and that has one or more amino acid residues selected from the group consisting of A at position 27, Q at position 46, I at position 54, V at position 60, V at position 65, T at position 67, S at position 87, R at position 91, A at position 95, E at position 96, G at position 99, M or A or Q at position 100, R at position 117, S at position 118, E at position 121, S at position 135, S at position 144, A at position 146, T at position 152, N at position 153, M at position 178, N at position 179, N at position 182, V at position 190, A at position 199, Y at position 201, Y at position 205, L at position 236, T at position 238, and E or A at position 251; and
[0099] (b) an amino acid sequence encoded by a nucleic acid that hybridizes under stringent conditions over substantially the entire length of a nucleic acid corresponding to SEQ ID NO: 749, and wherein the encoded polypeptide, when optimally aligned with SEQ ID NO: 750, comprises an amino acid sequence having at least one amino acid residue selected from the group consisting of A at position 27, Q at position 46, I at position 54, V at position 60, V at position 65, T at position 67, S at position 87, R at position 91, A at position 95, E at position 96, G at position 99, M or A or Q at position 100, R at position 117, S at position 118, E at position 121, S at position 135, S at position 144, A at position 146, T at position 152, N at position 153, M at position 178, N at position 179, N at position 182, V at position 190, A at position 199, Y at position 201, Y at position 205, L at position 236, T at position 238, and E or A at position 251.

[0100] In another embodiment of the polynucleotide of the immediately preceding paragraph, wherein the at least one or more residues is selected from the group consisting of A at position 27, Q at position 46, I at position 54, V at position 60, S at position 87, R at position 91, A at position 95, E at position 96, G at position 99, M or A or Q at position 100, R at position 117, S at position 118, R at position 121, S at position 135, S at position 144, A at position 146, N at position 153, M at position 178, N at position 179, N at position 182, V at position 190, A at position 199, Y at position 201, L at position 236, T at position 238, and E or A at position 251. This latter group does not include 38Q and 67T. In a first alternate embodiment, the one or more residues for above-described encoded polypeptide (polypeptide X) is selected from the group consisting of V at position 60, R at position 91, E at position 96, A at position 100, R at position 117, S at position 118, N at position 153, M at position 178, N at position 179, N at position 182, V at position 190, and A at position 251. Within the scope of this embodiment, a preferred polynucleotide is an isolated polynucleotide encoding a polypeptide of SEQ ID NO: 750 having HHDH enzymatic activity and having one or more of the following residue substitutions: A60V, K91R, D96E, T100A, S117R, Q118S, S153N, L178M, H179N, D182N, E190V and G251A.

[0101] In a second alternate embodiment, the one or more residues for above-described encoded polypeptide (polypeptide X) is selected from the group consisting of A at position 27, Q at position 46, S at position 87, A at position 95, Q at position 100, S at position 144, A at position 199, Y at position 201, and L at position 236. Within the scope of this embodiment, a preferred polynucleotide is an isolated polynucleotide encoding a polypeptide of SEQ ID NO: 750 having HHDH enzymatic activity and having one or more of the following residue substitutions: T27A, E46Q, R87S, E95A, T100Q, T144S, V199A, H201Y and V236L.

[0102] In yet another embodiment of the above described polynucleotide, the encoded amino acid sequence is at least 80% identical to SEQ ID NO: 750 (typically at least 85% identical, more typically at least 90% identical, preferably at least 95% identical, more preferably at least 97% identical, even more preferably at least 98% identical, and most preferably at least 99% identical to SEQ ID NO: 750) and comprises two or more residues selected from the group consisting of A at position 27, Q at position 46, I at position 54, V at position 60, S at position 87, R at position 91, A at position 95, E at position 96, G at position 99, M or A or Q at position 100, R at position 117, S at position 118, R at position 121, S at position 135, S at position 144, A at position 146, N at position 153, M at position 178, N at position 179, N at position 182, V at position 190, A at position 199, Y at position 201, L at position 236, T at position 238, and E or A at position 251.

[0103] In another embodiment, the present invention is directed to an isolated polynucleotide encoding a polypeptide having HHDH activity, wherein the polypeptide comprises an amino acid sequence selected from the group consisting of:
[0104] (a) an amino acid sequence that is at least 80% identical to SEQ ID NO: 750 (typically at least 85% identical, more typically at least 90% identical, preferably at least 95% identical, more preferably at least 97% identical, even more preferably at least 98% identical, and most preferably at least 99% identical to SEQ ID NO: 750) and that has two or more residues are selected from the group consisting of A at position 27, Q at position 38, Q at position 46, I at position 54, V at position 60, T at position 67, S at position 87, R at position 91, A at position 95, E at position 96, G at position 99, M or A or Q at position 100, R at position 117, S at position 118, R at position 121, S at position 135, S at position 144, A at position 146, N at position 153, M at position 178, N at position 179, N at position 182, V at position 190, A at position 199, Y at position 201, L at position 236, T at position 238, and E or A at position 251; and
[0105] (b) an amino acid sequence encoded by a nucleic acid that hybridizes under stringent conditions over substantially the entire length of a nucleic acid corresponding to SEQ ID NO: 749, and wherein the encoded polypeptide, when optimally aligned with SEQ ID NO: 750, comprises an amino acid sequence having two or more residues are selected from the group consisting of A at position 27, Q at position 38, Q at position 46, I at position 54, V at position 60, T at position 67, S at position 87, R at position 91, A at position 95, E at position 96, G at position 99, M or A or Q at position 100, R at position 117, S at position 118, R at position 121, S at position 135, S at position 144, A at position 146, N at position 153, M at position 178, N at position 179, N at position 182, V at position 190, A at position 199, Y at position 201, L at position 236, Tat position 238, and E or A at position 251. In a more preferred embodiment, the “two or more residues” are three or more residues. In an even more preferred embodiment, the three or more residues are the following three residues: R at position 121, S at position 135, and A at position 146.

[0106] The present invention is also directed to an isolated polynucleotide encoding a polypeptide having HHDH activity, wherein the polypeptide is at least 97% identical to SEQ ID NO: 750, preferably at least 98% identical, more preferably at least 99% identical. In another embodiment, the present invention is also directed to an isolated (typically recombinant) polypeptide having HHDH activity, wherein the polypeptide is at least 97% identical to SEQ ID NO: 750, and wherein the amino acid sequence of the polypeptide comprises one or more amino acid residue selected from the group consisting of A at position 27, Q at position 38, Q at position 46, I at position 54, V at position 60, T at position 67, S at position 87, R at position 91, A at position 95, E at position 96, G at position 99, M or A or Q at position 100, R at position 117, S at position 118, R at position 121, S at position 135, S at position 144, A at position 146, N at position 153, M at position 178, N at position 179, N at position 182, V at position 190, A at position 199, Y at position 201, L at position 236, T at position 238, and E or A at position 251.

[0107] In a third aspect, the present invention is directed to a host cell comprising any polynucleotide of the present invention as described above. Typically, the polynucleotide is operatively connected to one or more promoters and/or enhancers that provide for expression of the polynucleotide in the host cell.

[0108] In its fourth aspect, the present invention is directed to a method of making a polypeptide having enhanced HHDH enzymatic activity, comprising
[0109] (a) transforming a host cell with any one of the above described polynucleotides of the present invention;
[0110] (b) culturing the transformed host cell in a culture medium under conditions that cause said polynucleotide to express the encoded HHDH polypeptide; and
[0111] (c) isolating the expressed HHDH polypeptide from the culture medium or from the transformed and cultured host cells.

[0112] In yet other aspects, he present invention provides an isolated or recombinant polypeptide having HHDH activity, wherein the HHDH polypeptide comprises an amino acid sequence selected from the group consisting of: a polypeptide having an amino acid sequence that is at least 99% identical to SEQ ID NO: 4, 12, 16, 18, 34, 38, 44, 48, 52, 66 80, 84, 114, 154, 158, 170, or 270.

[0113] As used herein, the terms “HHDH activity” and “halohydrin dehalogenase activity” are used interchangeably herein to refer to the ability to catalyze the conversion of ethyl (S)-4-chloro-3-hydroxybutyrate (“ECHB”) to a detectable amount of ethyl (R) 4-cyano-3-hydroxybutyrate (“HN”) using the assay described in Example 5A. The term “HHDH polypeptide” refers herein to a polypeptide having HHDH activity. The term “HHDH polynucleotide” refers to a polynucleotide encoding a polypeptide having HHDH activity.

[0114] As used herein, the term “isolated” refers to a nucleic acid, polynucleotide, polypeptide, protein, or other component that is partially or completely separated from components with which it is normally associated (other proteins, nucleic acids, cells, synthetic reagents, etc.). A nucleic acid or polypeptide is “recombinant” when it is artificial or engineered, or derived from an artificial or engineered protein or nucleic acid. For example, a polynucleotide that is inserted into a vector or any other heterologous location, e.g., in a genome of a recombinant organism, such that it is not associated with nucleotide sequences that normally flank the polynucleotide as it is found in nature is a recombinant polynucleotide. A protein expressed in vitro or in vivo from a recombinant polynucleotide is an example of a recombinant polypeptide. Likewise, a polynucleotide sequence that does not appear in nature, for example a variant of a naturally occurring gene, is recombinant.

[0115] The terms “percent identity,” “% identity,” “percent identical,” and “% identical” are used interchangeably herein to refer to the percent amino acid sequence identity that is obtained by ClustalW analysis (version W 1.8 available from European Bioinformatics Institute, Cambridge, UK), counting the number of identical matches in the alignment and dividing such number of identical matches by the length of the reference sequence, and using the following default ClustalW parameters to achieve slow/accurate pairwise optimal alignments—Gap Open Penalty: 10; Gap Extension Penalty:0.10; Protein weight matrix: Gonnet series; DNA weight matrix: IUB; Toggle Slow/Fast pairwise alignments=SLOW or FULL Alignment.

[0116] The present invention also provides a polypeptide having an amino acid sequence that is at least 98% identical to SEQ ID NO: 10, 14, 68, 118, 164, 166, or 180. Desirable HHDH polypeptides include those that are at least 99% identical to SEQ ID NO: 10, 14, 68, 118, 164, 166, or 180.

[0117] In another embodiment, the present invention provides a polypeptide having an amino acid sequence that is at least 97% identical to SEQ ID NO: 110, 162, 262, 422, 440, or 520. Some HHDH polypeptides of the present invention are at least 98%, and sometimes at least 99% identical to SEQ ID NO: 110, 162, 262, 422, 440, or 520.

[0118] In yet another embodiment, the present invention is directed to a polypeptide, typically an isolated and purified polypeptide having HHDH activity greater than the wild-type HHDH of SEQ ID NO. 2, and having an amino acid sequence that is at least 93% identical to SEQ ID NO: 200, typically, 95% identical to SEQ ID NO: 200; more typically, 97% identical to SEQ ID NO: 200; most typically, 99% identical to SEQ ID NO: 200.

[0119] In still another embodiment, the present invention is directed to a polypeptide, typically an isolated and purified polypeptide having HHDH activity greater than the wild-type HHDH of SEQ ID NO. 2, and having an amino acid sequence that is at least 89% identical to SEQ ID NO: 442; typically, 93% identical to SEQ ID NO: 442; more typically, 95% identical to SEQ ID NO: 442; even more typically, 97% identical to SEQ ID NO: 442; most typically, 99% identical to SEQ ID NO: 442.

[0120] In another embodiment, the present invention is directed to a polypeptide, typically an isolated and purified polypeptide having HHDH activity greater than the wild-type HHDH of SEQ ID NO. 2, and having an amino acid sequence that is at least 88% identical to SEQ ID NO: 702; typically, 93% identical to SEQ ID NO: 702: more typically, 95% identical to SEQ ID NO: 702; even more typically, 97% identical to SEQ ID NO: 702; most typically, 99% identical to SEQ ID NO: 702.

[0121] In a further embodiment, the present invention provides an HHDH polypeptide having an amino acid sequence that is at least 96% identical to SEQ ID NO: 116 or 448. HHDH polypeptides of the present invention include those that are least 97% identical, 98% identical, and 99% identical to SEQ ID NO: 116 or 448.

[0122] The present invention further provides an HHDH polypeptide having an amino acid sequence that is at least 95% identical to SEQ ID NO: 264, 266, 470 or 476. Desirable HHDH polypeptides of the present invention include those that are least 96% identical, 97% identical, 98% identical, and 99% identical to SEQ ID NO: 264, 266, 470 or 476.

[0123] The present invention further provides an HHDH polypeptide that is at least 80% identical to SEQ ID NO: 2, when optimally aligned with SEQ ID NO:2, and which further has one or more substitutions selected from the group consisting of S2T, either T3A or T3P, A4V, V6D, either V9I or V9F, K10L, G13S, G14S, M15K, G16C, either S17T or S17R, either R20S, R20C or R20K, A24T, H26Q, V28F, A29T, C30A, H31L, E33G, S34R, F35L, K36N, Q37H, E40D, F44L, A45P, either T47P or T47A, K52N, M54V, S55R, E56D, E58K, either E61G or E61D, 163V, Q72R, V751, L76P, S78C, F82Y, either P84S or P84L, E85Q, K91E, A93D, E9SQ or E9SG, D96N, V101I, R107K, V112A, either A114T or A114G or A114S, V115A, S117P, K120N, K121E, R122P, H126R, 1130V, A133S, T134A or T134V, F136L or F136W or F136V, W139H, L1421 or L142R, T144S, T146S, A152T, C153S, either T154S or T154A, 1168V, P169T, Y177F, or Y177A, L178V, S1801, E181G or E181I, P184K, F186Y, T1941, H198N, V199M, K215E, V236G, F237V, W238L, A240T, either M245I or M245A or M245V, W249Y, M252V or M2521, and E254V. In some embodiments, HHDH polypeptides of the present invention are at least 85% identical to SEQ ID NO: 2 and having one or more of the substitutions indicated above. Some HHDH polypeptides of the present invention are at least about 90% identical to SEQ ID NO: 2, some are at least about 95% identical to SEQ ID NO: 2, and others are at least 99% identical to SEQ ID NO: 2, all having one or more of the substitutions indicated above. Some of these HHDH polypeptides have at least 2 or more of the aforementioned substitutions, and some of these HHDH polypeptides have at least 3 or more of the aforementioned substitutions.

[0124] When optimally aligned with sequence SEQ ID NO: 2, certain HHDH polypeptides of the present invention have a sequence corresponding to SEQ ID NO: 2, but one or more amino acid substitutions selected from the group consisting of S2T, either T3A or T3P, A4V, V6D, either V91 or V9F, K10L, G13S, G14S, M15K, G16C, either S17T or S17R, either R20S, R20C or R20K, A24T, H26Q, V28F, A29T, C30A, H31L, E33G, S34R, F35L, K36N, Q37H, E40D, F44L, A45P, either T47P or T47A, K52N, M54V, S55R, E56D, E58K, either E61G or E61D, 163V, Q72R, V751, L76P, S78C, F82Y, either P84S or P84L, E85Q, K91E, A93D, E95Q or E95G, D96N, V101I, R107K, V112A, either A114T or A114G or A114S, V115A, S117P, K120N, K121E, R122P, H126R, 1130V, A133S, T134A or T134V, F136L or F136W or F136V, W139H, L1421 or L142R, T144S, T146S, A152T, C153S, either T154S or T154A, 1168V, P169T, Y177F or Y177A, L178V, S180I, E18G or E181I, P184K, F186Y, T1941, H198N, V199M, K215E, V236G, F237V, W238L, A240T, either M2451 or M245A or M245V, W249Y, M252V or M252I, and E254V. In some embodiments, the HHDH polypeptides have two or more, and sometimes three or four or more of the aforementioned substitutions. Typically, in this embodiment, the resulting HHDH polypeptide has at least 80% of sequence identity with SEQ ID NO: 2; more typically, at least 90% sequence identity; even more typically at least 95% sequence identity; and yet even more typically at least 98% sequence identity.

[0125] The HHDH polypeptides described herein may further have one or more amino acid residues selected from the group consisting of Q at position 37, Y at position 70, Q at position 72, Q at position 80, G at position 99, R at position 107, T at position 146, C at position 153, F at position 186, T at position 189, and A at position 222. In some embodiments, the HHDH polypeptides of the present invention have two, three, or four or more of these selected residues. Of these residues, Q37, Y70, Q87, R107, T146, C153, and F186 appear to correlate favorably with HHDH activity. Others appear to correlate favorably well with resistance to inhibition by ethyl-4-chloroacetate, as discussed in more detail below.

[0126] Two sequences are “optimally aligned” when they are aligned for similarity scoring using a defined amino acid substitution matrix (e.g., BLOSUM62), gap existence penalty and gap extension penalty so as to arrive at the highest core possible for that pair of sequences. Amino acid substitution matrices and their use in quantifying the similarity between two sequences are well-known in the art. See e.g., Dayhoff et al. (1978), “A model of evolutionary change in proteins”; “Atlas of Protein Sequence and Structure,” Vol. 5, Suppl. 3 (Ed. M. O. Dayhoff), pp. 345-352, Natl. Biomed. Res. Round., Washington, D.C.; Henikoff et al. (1992) Proc. Natl. Acad. Sci. USA, 89:10915-10919. The BLOSUM62 matrix is often used as a default scoring substitution matrix in sequence alignment protocols such as Gapped BLAST 2.0. The gap existence penalty is imposed for the introduction of a single amino acid gap in one of the aligned sequences, and the gap extension penalty is imposed for each additional empty amino acid position inserted into an already opened gap. The alignment is defined by the amino acids position of each sequence at which the alignment begins and ends, and optionally by the insertion of a gap or multiple gaps in one or both sequences so as to arrive at the highest possible score. While optimal alignment and scoring can be accomplished manually, the process is facilitated by the use of a computer-implemented alignment algorithm, e.g., gapped BLAST 2.0, described in Altschul, et al. (1997) Nucleic Acids Res., 25:3389-3402, and made available to the public at the National Center for Biotechnology Information Website. Optimal alignments, including multiple alignments can be prepared using readily available programs such as PSI-BLAST, which is described by Altschul, et al. (1997) Nucleic Acids Res., 25:3389-3402.

[0127] With respect to an amino acid sequence that is optimally aligned with a reference sequence, an amino acid residue “corresponds to” the position in the reference sequence with which the residue is paired in the alignment. The “position” is denoted by a number that sequentially identifies each amino acid in the reference sequence based on its position relative to the N-terminus. Owing to deletions, insertions, truncations, fusions, and the like that must be taken into account when determining an optimal alignment, in general the amino acid residue number in a test sequence is determined by simply counting from the N-terminal will not necessarily be the same as the number of its corresponding position in the reference sequence. For example, in a case where there is a deletion in an aligned test sequence, there will be no amino acid that corresponds to a position in the reference sequence at the site of deletion. Where there is an insertion in an aligned reference sequence, that insertion will not correspond to any amino acid position in the reference sequence. In the case of truncations or fusions there can be stretches of amino acids in either the reference or aligned sequence that do not correspond to any amino acid in the corresponding sequence.

[0128] In a further embodiment, the present invention provides an HHDH polypeptide that is at least 93% identical to SEQ ID NO: 200 (i.e., 18 or fewer amino acid differences as compared to SEQ ID NO: 200, when optimally aligned with SEQ ID NO: 200). Some of these HHDH polypeptides are at least 95% identical to SEQ ID NO: 200, and some are at least 97, 98, or 99% identical to SEQ ID NO: 200. In certain embodiments, these polypeptides have one or more of the following residues: T at (residue) position 2, A or P or S at position 3, V at position 4, D at position 6, either I or F at position 9, L at position 10, S at position 13, S at position 14, K at position 15, C at position 16, T or R at position 17, either C or S or K at position 20, T at position 24, Q at position 26, F at position 28, T at position 29, A at position 30, L at position 31, G at position 33, R at position 34, L at position 35, N at position 36, H at position 37, D at position 40, L at position 44, P at position 45, either P or A at position 47, N at position 52, V at position 54, R at position 55, D at position 56, K at position 58, G or D at position 61, V at position 63, R at position 72, I at position 75, P at position 76, C at position 78, Y at position 82, either S or L at position 84, A at position 85, E at position 91, D at position 93, Q or G at position 95, N at position 96, K at position 107, A at position 112, either T, S or G at position 114, A at position 115, P at position 117, N at position 120, E at position 121, P at position 122, R at position 126, V at position 130, S at position 133, A or V at position 134, L, W or V at position 136, H at position 139, I or R at position 142, S at position 144, S at position 146, T at position 152, S at position 153, either S or A at position 154, V at position 168, T at position 169, F at position 177, V at position 178, I at position 180, G or I at position 181, K at position 184, Y at position 186, L at position 194, N at position 198, M at position 199, E at position 215, G at position 236, V at position 237, L at position 238, T at position 240, either I or A or V at position 245, Y at position 249, V or I at position 252, and V at position 254.

[0129] In yet another embodiment, the present invention is directed to an isolated or recombinant polypeptide having at least 1.4 fold greater HHDH activity as compared to wild-type HHDH having the amino acid sequence of SEQ ID NO: 2,
[0130] wherein the polypeptide has an amino acid sequence selected from the group consisting of SEQ ID NO: 4, 10, 12, 14, 16, 18, 34, 38, 44, 48, 50, 52, 66, 68, 80, 84, 110, 114, 116, 118, 154, 158, 162, 164, 166, 170, 180, 191, 200, 262, 264, 266, 270, 422, 440, 442, 448, 470, 476, 520, 702, 726, 730, 732, 734, 736, 738, 744, 746, 748 and 750.

[0131] The present invention also provides HHDH polypeptides encoded by a nucleic acid that hybridizes under stringent conditions over substantially the entire length of a nucleic acid corresponding to SEQ ID NO: 1, where the encoded polypeptide, when optimally aligned with SEQ ID NO: 2, comprises an amino acid sequence having at least one amino acid residue selected from the group consisting of T at (residue) position 2, A or P or S at position 3, V at position 4, D at position 6, either I or F at position 9, L at position 10, S at position 13, S at position 14, K at position 15, C at position 16, T or R at position 17, either S or K at position 20, T at position 24, Q at position 26, F at position 28, T at position 29, A at position 30, L at position 31, G at position 33, R at position 34, L at position 35, N at position 36, H at position 37, D at position 40, L at position 44, P at position 45, either P or A at position 47, N at position 52, V at position 54, R at position 55, D at position 56, G or D at position 61, V at position 63, R or Q at position 72, I at position 75, P at position 76, C at position 78, Y at position 82, either S or L at position 84, A at position 85, E at position 91, D at position 93, Q or G at position 95, N at position 96, G at position 99, I at position 101, K at position 107, A at position 112, either T, S or G at position 114, A at position 115, P at position 117, N at position 120, E at position 121, P at position 122, R at position 126, V at position 130, S at position 133, A or V at position 134, L, W or V at position 136, H at position 139, I or R at position 142, S at position 144, S at position 146, T at position 152, S at position 153, either S or A at position 154, V at position 168, T at position 169, F or A at position 177, V at position 178, I at position 180, G or I at position 181, K at position 184, Y at position 186, T at position 189, L at position 194, N at position 198, M at position 199, E at position 215, A at position 222, G at position 236, V at position 237, L at position 238, T at position 240, either I or A or V at position 245, Y at position 249, V or I at position 252, and V at position 254.

[0132] The present invention also provides an isolated or recombinant polypeptide having at least 1.4 fold greater (typically 1.4 fold to 10,000 fold greater, more typically 1.4 fold to 1000 fold greater) HHDH activity as compared to wild-type HHDH having the amino acid sequence of SEQ ID NO: 2, and
[0133] wherein the polypeptide is encoded by a nucleic acid that hybridizes under stringent conditions over substantially the entire length of a nucleic acid having a sequence selected from the group consisting of SEQ ID NO: 3, 9, 11, 13, 15, 17, 33, 37, 43, 47, 49, 51, 65, 67, 79, 83, 109, 113, 115, 117, 153, 157, 161, 163, 165, 169, 179, 191, 199, 261, 263, 265, 269, 421, 439, 441, 447, 469, 475, 519, 701, 725, 729, 731, 733, 735, 737, 743, 745, 747, 749 and complementary sequences thereof.

[0134] Nucleic acids “hybridize” when they associate, typically in solution. Nucleic acids hybridize due to a variety of well-characterized physico-chemical forces, such as hydrogen bonding, solvent exclusion, base stacking and the like. An extensive guide to the hybridization of nucleic acids is found in Tijssen (1993) “Laboratory Techniques in biochemistry and Molecular Biology-Hybridization with Nucleic Acid Probes,” Part I, Chapter 2 (Elsevier, N.Y.).

[0135] As used herein, the term “stringent hybridization wash conditions” in the context of nucleic acid hybridization experiments, such as Southern and Northern hybridizations, are sequence dependent, and are different under different environmental parameters. An extensive guide to the hybridization of nucleic acids is found in Tijessen (1993) “Laboratory Techniques in Biochemistry and Molecular Biology-Hybridization with Nucleic Acid Probes,” Part I, Chapter 2 (Elsevier, N.Y.).

[0136] For purposes of the present invention, “highly stringent” (or “high stringency”) hybridization and wash conditions are generally selected to be about 5° C. or less lower than the thermal melting point (Tₘ) for the specific sequence at a defined ionic strength and pH (as noted below, highly stringent conditions can also be referred to in comparative terms). The Tₘ is the temperature (under defined ionic strength and pH) at which 50% of the test sequence hybridizes to a perfectly matched probe. Very stringent conditions are selected to be equal to the Tₘ for a particular probe.

[0137] The Tₘ of a nucleic acid duplex indicates the temperature at which the duplex is 50% denatured under the given conditions and it represents a direct measure of the stability of the nucleic acid hybrid. Thus, the Tₘ corresponds to the temperature corresponding to the midpoint in transition from helix to random coil; it depends on length, nucleotide composition, and ionic strength for long stretches of nucleotides.

[0138] After hybridization, unhybridized nucleic acid material can be removed by a series of washes, the stringency of which can be adjusted depending upon the desired results. Low stringency washing conditions (e.g., using higher salt and lower temperature) increase sensitivity, but can produce nonspecific hybridization signals and high background signals (i.e., loses specificity). Higher stringency conditions (e.g., using lower salt and higher temperature that is closer to the hybridization temperature) lowers the background signal, typically with only the specific signal remaining (i.e., increases specificity). See Rapley, R. and Walker, J. M. Eds., “Molecular Biomethods Handbook” (Humana Press, Inc. 1998).

[0139] The Tₘ of a DNA-DNA duplex can be estimated using Equation I as follows:
Tₘ (° C.)=81.5° C.+16.6 (log₁₀M)+0.41 (% G+C)−0.72 (% f)−500/n,
[0140] where M is the molarity of the monovalent cations (usually Na+), (% G+C) is the percentage of guanosine (G) and cystosine (C) nucleotides, (% f) is the percentage of formamide and n is the number of nucleotide bases (i.e., length) of the hybrid. See id.

[0141] The Tₘ of an RNA-DNA duplex can be estimated by using Equation 2 as follows:

[0142] Tₘ (° C.)=79.8° C.+18.5 (log₁₀M)+0.58 (% G+C)−11.8(% G+C)²−0.56 (% f)−820/n, where M is the molarity of the monovalent cations (usually Na+), (% G+C) is the percentage of guanosine (G) and cystosine (C) nucleotides, (% f) is the percentage of formamide and n is the number of nucleotide bases (i.e., length) of the hybrid. Id.

[0143] Equations 1 and 2 are typically accurate only for hybrid duplexes longer than about 100-200 nucleotides. Id.

[0144] The Tm of nucleic acid sequences shorter than 50 nucleotides can be calculated as follows:
Tₘ(° C.)=4(G+C)+2(A+T),
[0145] where A (adenine), C, T (thymine), and G are the numbers of the corresponding nucleotides.

[0146] An example of stringent hybridization conditions for hybridization of complementary nucleic acids which have more than 100 complementary residues on a filter in a Southern or northern blot is 50% formamide with 1 mg of heparin at 42° C., with the hybridization being carried out overnight. An example of stringent wash conditions is a 0.2×SSC wash at 65° C. for 15 minutes (see Sambrook, et al., Molecular Cloning—A Laboratory Manual” (1989) Cold Spring Harbor Laboratory (Cold Spring Harbor, N.Y.) for a description of SSC buffer). Often the high stringency wash is preceded by a low stringency wash to remove background probe signal. An example low stringency wash is 2×SSC at 40° C. for 15 minutes.

[0147] In general, a signal to noise ratio of 2.5×-5× (or higher) than that observed for an unrelated probe in the particular hybridization assay indicates detection of a specific hybridization. Detection of at least stringent hybridization between two sequences in the context of the present invention indicates relatively strong structural similarity or homology to, e.g., the nucleic acids of the present invention provided in the sequence listings herein.

[0148] As noted, “highly stringent” conditions are selected to be about 5° C. or less lower than the thermal melting point (Tₘ) for the specific sequence at a defined ionic strength and pH. Target sequences that are closely related or identical to the nucleotide sequence of interest (e.g., “probe”) can be identified under highly stringent conditions. Lower stringency conditions are appropriate for sequences that are less complementary.

[0149] Stringent hybridization (as well as highly stringent, ultra-high stringency, or ultra-ultra high stringency hybridization conditions) and wash conditions can be readily determined empirically for any test nucleic acid. For example, in determining highly stringent hybridization and wash conditions, the hybridization and wash conditions are gradually increased (e.g., by increasing temperature, decreasing salt concentration, increasing detergent concentration and/or increasing the concentration of organic solvents, such as formamide, in the hybridization or wash), until a selected set of criteria are met. For example, the stringency of hybridization and wash conditions are gradually increased until a probe corresponding to SEQ ID NO: 3, 9, 11, 13, 15, 17, 33, 37, 43, 47, 49, 51, 65, 67, 79, 83, 109, 113, 115, 117, 153, 157, 161, 163, 165, 169, 179, 191, 199, 261, 263, 265, 269, 421, 439, 441, 447, 469, 475, 519, 701 or complementary sequence thereof, binds to a perfectly matched complementary target. A test nucleic acid is said to specifically hybridize to a probe nucleic acid when it hybridizes at least ½ as well to the probe as to the perfectly matched complementary target, i.e., with a signal to noise ratio at least ½ as high as hybridization of the probe to the target under conditions in which the perfectly matched probe binds to the perfectly matched complementary target.

[0150] Ultra high-stringency hybridization and wash conditions are those in which the stringency of hybridization and wash conditions are increased until the signal to noise ratio for binding of the probe to the perfectly matched complementary target nucleic acid is at least 10×. A target nucleic acid which hybridizes to a probe under such conditions, with a signal to noise ratio of at least ½ that of the perfectly matched complementary target nucleic acid is said to bind to the probe under ultra-high stringency conditions.

[0151] Similarly, even higher levels of stringency can be determined by gradually increasing the stringency of hybridization and/or wash conditions of the relevant hybridization assay. For example, those in which the stringency of hybridization and wash conditions are increased until the signal to noise ratio for binding of the probe to the perfectly matched complementary target nucleic acid is at least 10×, 20×, 50×, 100×, or 500×. A target nucleic acid which hybridizes to a probe under such conditions, with a signal to noise ratio of at least ½ that of the perfectly matched complementary target nucleic acid is said to bind to the probe under ultra-ultra-high stringency conditions.

[0152] Specific HHDH polypeptides of the present invention include those having an amino acid sequence corresponding to SEQ ID NOS: 4, 6, 8, 10, 12, 14, 16, 18, 20, 22, 24, 26, 28, 30, 34, 36, 38, 40, 42, 44, 46, 48, 50, 52, 54, 56, 58, 60, 62, 64, 66, 68, 70, 72, 74, 76, 78, 80, 82, 84, 86, 88, 90, 92, 94, 96, 98, 100, 102, 104, 106, 108, 110, 112, 114, 116, 118, 120, 122, 124, 126, 128, 130, 132, 134, 136, 138, 140, 142, 144, 146, 148, 150, 152, 154, 156, 158, 160, 162, 164, 166, 168, 170, 172, 174, 176, 178, 180, 182, 184, 186, 188, 190, 192, 194, 196, 198, 200, 202, 204, 206, 208, 210, 212, 214, 216, 218, 220, 222, 224, 226, 228, 230, 232, 234, 236, 238, 240, 242, 244, 246, 248, 250, 252, 254, 256, 258.260, 262, 264, 266, 268, 270, 272, 274, 276, 278, 280, 282, 284, 286, 288, 290, 292, 294, 296, 298, 300, 302, 304, 306, 308, 310, 312, 314, 316, 318, 320, 322, 324, 326, 328, 330, 332, 334, 336, 338, 340, 342, 344, 346, 348, 350, 352, 354, 356, 358, 360, 362, 364, 368, 370, 372, 374, 376, 378, 380, 382, 384, 386, 388, 390, 392, 394, 396, 398, 400, 402, 404, 406, 408, 410, 412, 414, 416, 418, 420, 422, 424, 426, 428, 430, 432, 434, 436, 438, 440, 442, 444, 446, 448, 450, 452, 454, 456, 458, 460, 462, 464, 466, 468, 470, 472, 474, 476, 478, 480, 482, 484, 486, 488, 490, 492, 494, 496, 498, 500, 502, 504, 506, 508, 510, 512, 514, 516, 518, 520, 522, 524, 526, 528, 530, 532, 534, 536, 538, 540, 542, 544, 546, 548, 550, 552, 554, 556, 558, 560, 562, 564, 566, 568, 570, 572, 574, 576, 578, 580, 582, 584, 586, 588, 590, 592, 594, 596, 598, 600, 602, 604, 606, 608, 610, 612, 614, 616, 618, 620, 622, 624, 626, 628, 630, 632, 634, 636, 638, 640, 642, 644, 646, 648, 650, 652, 654, 656, 658, 660, 662, 664, 666, 668, 670, 672, 674, 676, 678, 680, 682, 684, 686, 688, 690, 692, 694, 696, 698, 700, 702, 704, 706, 708, 710, 712, 714, 716, 718, 720, 722, 724, 726, 728, 730, 732, 734, 736, 738, 740, 742, 744, 746, 748, 750, 752, 754, 756, 758, 760, 762, 764, 766, 768, 770, 772, 774, 776, 778, 780, 782, 784, 786, 788, 790, 792, 794, 796, 798, 800, 802, 804, 806, 808, 810, 812, 814, 816, 818, 820, 822, 824, 826, 828, 830, 832, 834, 836, 838, 840, 842, 844, 846, 848, 850, 852, 854, 856, 858, 860, 862, 864, 866, 868, 870, 872, 874, 876, 878, 880, 882, 884, 886, 888, 890, 892, 894, 896, 898, 900, 902, 904, 906, 908, 910, 912, 914, 916, 918, 920, 922, 924, 926, 928, 930, 932, 934, 936, 938, 940, 942, 944, 946, 948, 950, 952, 954, 956, 958, 960, 962, 964, 966, 968, 970, 972, 974, 976, 978, 980, 982, 984, 986, 988, 990, 992, 994, 996, 998, 1000, 1002, 1004, 1006, 1008, 1010, 1012, 1014, 1016, 1018, 1020, 1022, 1024, 1026, 1028, 1030, 1032, 1034, 1036, 1038, 1040, 1042, 1044, 1046, 1048, 1050, 1052, 1054, 1056, 1058, 1060, 1062, 1064, 1066, 1068, 1070, 1072, 1074, 1076, 1078, 1080, 1082, 1084, 1086, 1088, 1090, 1092, 1094, 1096, 1098, 1100, 1102, 1104, 1106, 1108, 1110, 1112, 1114, 1116, 1118, 1120, 1122, 1124, 1126, 1128, 1130, 1132, 1134, 1136, 1138, 1140, 1142, or 1144. All of these HHDH polypeptides have demonstrated activity in the assays described in Example 5A or 5B.

[0153] Exemplary HHDH polynucleotides that encode these HHDH polypeptides are provided herein as SEQ ID NOS: 3, 5, 7, 9, 11, 13, 15, 17, 19, 21, 23, 25, 27, 29, 33, 35, 37, 39, 41, 43, 45, 47, 49, 51, 53, 55, 57, 59, 61, 63, 65, 67, 69, 71, 73, 75, 77, 79, 81, 83, 85, 87, 89, 91, 93, 95, 97, 99, 101, 103, 105, 107, 109, 111, 113, 115, 117, 119, 121, 123, 125, 127, 129, 131, 133, 135, 137, 139, 141, 143, 145, 147, 149, 151, 153, 155, 157, 159, 161, 163, 165, 167, 169, 171, 173, 175, 177, 179, 181, 183, 185, 187, 189, 191, 193, 195, 197, 199, 201, 203, 205, 207, 209, 211, 213, 215, 217, 219, 221, 223, 225, 227, 229, 231, 233, 235, 237, 239, 241, 243, 245, 247, 249, 251, 253, 255, 257, 259, 261, 263, 265, 267, 269, 271, 273, 275, 277, 279, 281, 283, 285, 287, 289, 291, 293, 295, 297, 299, 301, 303, 305, 307, 309, 311, 313, 315, 317, 319, 321, 323, 325, 327, 329, 331, 333, 335, 337, 339, 341, 343, 345, 347, 349, 351, 353, 355, 357, 359, 361, 363, 365, 367, 369, 371, 373, 375, 377, 379, 381, 383, 385, 387, 389, 391, 393, 395, 397, 399, 401, 403, 405, 407, 409, 411, 413, 415, 417, 419, 421, 423, 425, 427, 429, 431, 433, 435, 437, 439, 441, 443, 445, 447, 449, 451, 453, 455, 457, 459, 461, 463, 465, 467, 469, 4712, 473, 475, 477, 479, 481, 483, 485, 487, 489, 491, 493, 495, 497, 499, 501, 503, 505, 507, 509, 511, 513, 515, 517, 519, 521, 523, 525, 527, 529, 531, 533, 535, 537, 539, 541, 543, 545, 547, 549, 551, 553, 555, 557, 559, 561, 563, 565, 567, 569, 571, 573, 575, 577, 579, 581, 583, 585, 587, 589, 591, 593, 595, 597, 599, 601, 603, 605, 607, 609, 611, 613, 615, 617, 619, 621, 623, 625, 627, 629, 631, 633, 635, 637, 639, 641, 643, 645, 647, 649, 651, 653, 655, 657, 659, 661, 663, 665, 667, 669, 671, 673, 675, 677, 679, 681, 683, 685, 687, 689, 691, 693, 695, 697, 699, 701, 703, 705, 707, 709, 711, 713, 715, 717, 719, 721, 723, 725, 727, 729, 731, 733, 735, 739, 741, 743, 745, 747, 749, 751, 753, 755, 757, 759, 761, 763, 765, 767, 769, 771, 773, 775, 777, 779, 781, 783, 785, 787, 789, 791, 793, 795, 797, 799, 801, 803, 805, 807, 809, 811, 813, 815, 817, 819, 821, 823, 825, 827, 829, 831, 833, 835, 837, 839, 841, 843, 845, 847, 849, 851, 853, 855, 857, 859, 861, 863, 865, 867, 869, 871, 873, 875, 877, 879, 881, 883, 885, 887, 889, 891, 893, 895, 897, 899, 901, 903, 905, 907, 909, 911, 913, 915, 917, 919, 921, 923, 925, 927, 929, 931, 933, 935, 937, 939, 941, 943, 945, 947, 949, 951, 953, 955, 957, 959, 961, 963, 965, 967, 969, 971, 973, 975, 977, 979, 981, 983, 985, 987, 989, 991, 993, 995, 997, 999, 1001, 1103, 1005, 1007, 1009, 1011, 1013, 1015, 1017, 1019, 1021, 1023, 1025, 1027, 1029, 1031, 1033, 1035, 1037, 1039, 1041, 1043, 1045, 1047, 1049, 1051, 1053, 1055, 1057, 1059, 1061, 1063, 1065, 1067, 1069, 1071, 1073, 1075, 1077, 1079, 1081, 1083, 1085, 1087, 1089, 1091, 1093, 1095, 1097, 1099, 1101, 1103, 1105, 1107, 1109, 1111, 1113, 1115, 1117, 1119, 1121, 1123, 1125, 1127, 1129, 1131, 1133, 1135, 1137, 1139, 1141, and 1143, respectively.

[0154] HHDH polypeptides of the present invention often have HHDH activity that is at least 1.4 fold greater HHDH activity as compared to wild-type HHDH having the amino acid sequence of SEQ ID NO: 2, as measured in the assay described in Example 5A. Some HHDH polypeptides of the present invention (SEQ ID NOS: 740, 742, 728, 90, 92, 94, 96 and 96) have HHDH enzyme activity that is at least 2 fold and often at least 2.4 fold up to 100 fold greater than the activity of Agrobacterium sp. HHDH (SEQ ID NO: 2); the HHDH polypeptides of SEQ ID NOS: 100, 732, 734 and 736 have HHDH enzyme activity that is from 100 to 500 fold greater than the activity of Agrobacterium sp. HHDH (SEQ ID NO: 2); and the HHDH polypeptides of SEQ ID NOS: 726 and 730 have HHDH enzyme activity that is 500 to 1000 times greater than the activity of Agrobacterium sp. HHDH (SEQ ID NO: 2), the enzyme activities being measured in the assay described in Example 5A.

[0155] The present invention also provides HHDH polypeptides that are variants of the polypeptide of SEQ ID NO: 4, 6, 8, 10, 12, 14, 16, 18, 20, 22, 24, 26, 28, 30, 34, 36, 38, 40, 42, 44, 46, 48, 50, 52, 54, 56, 58, 60, 62, 64, 66, 68, 70, 72, 74, 76, 78, 80, 82, 84, 86, 88, 90, 92, 94, 96, 98, 100, 102, 104, 106, 108, 110, 112, 114, 116, 118, 120, 122, 124, 126, 128, 130, 132, 134, 136, 138, 140, 142, 144, 146, 148, 150, 152, 154, 156, 158, 160, 162, 164, 166, 168, 170, 172, 174, 176, 178, 180, 182, 184, 186, 188, 190, 192, 194, 196, 198, 200, 202, 204, 206, 208, 210, 212, 214, 216, 218, 220, 222, 224, 226, 228, 230, 232, 234, 236, 238, 240, 242, 244, 246, 248, 250, 252, 254, 256, 258.260, 262, 264, 266, 268, 270, 272, 274, 276, 278, 280, 282, 284, 286, 288, 290, 292, 294, 296, 298, 300, 302, 304, 306, 308, 310, 312, 314, 316, 318, 320, 322, 324, 326, 328, 330, 332, 334, 336, 338, 340, 342, 344, 346, 348, 350, 352, 354, 356, 358, 360, 362, 364, 368, 370, 372, 374, 376, 378, 380, 382, 384, 386, 388, 390, 392, 394, 396, 398, 400, 402, 404, 406, 408, 410, 412, 414, 416, 418, 420, 422, 424, 426, 428, 430, 432, 434, 436, 438, 440, 442, 444, 446, 448, 450, 452, 454, 456, 458, 460, 462, 464, 466, 468, 470, 472, 474, 476, 478, 480, 482, 484, 486, 488, 490, 492, 494, 496, 498, 500, 502, 504, 506, 508, 510, 512, 514, 516, 518, 520, 522, 524, 526, 528, 530, 532, 534, 536, 538, 540, 542, 544, 546, 548, 550, 552, 554, 556, 558, 560, 562, 564, 566, 568, 570, 572, 574, 576, 578, 580, 582, 584, 586, 588, 590, 592, 594, 596, 598, 600, 602, 604, 606, 608, 610, 612, 614, 616, 618, 620, 622, 624, 626, 628, 630, 632, 634, 636, 638, 640, 642, 644, 646, 648, 650, 652, 654, 656, 658, 660, 662, 664, 666, 668, 670, 672, 674, 676, 678, 680, 682, 684, 686, 688, 690, 692, 694, 696, 698, 700, 702, 704, 706, 708, 710, 712, 714, 716, 718, 720, 722, 724, 726, 728, 730, 732, 734, 736, 738, 740, 742, 744, 746, 748, 750, 752, 754, 756, 758, 760, 762, 764, 766, 768, 770, 772, 774, 776, 778, 780, 782, 784, 786, 788, 790, 792, 794, 796, 798, 800, 802, 804, 806, 808, 810, 812, 814, 816, 818, 820, 822, 824, 826, 828, 830, 832, 834, 836, 838, 840, 842, 844, 846, 848, 850, 852, 854, 856, 858, 860, 862, 864, 866, 868, 870, 872, 874, 876, 878, 880, 882, 884, 886, 888, 890, 892, 894, 896, 898, 900, 902, 904, 906, 908, 910, 912, 914, 916, 918, 920, 922, 924, 926, 928, 930, 932, 934, 936, 938, 940, 942, 944, 946, 948, 950, 952, 954, 956, 958, 960, 962, 964, 966, 968, 970, 972, 974, 976, 978, 980, 982, 984, 986, 988, 990, 992, 994, 996, 998, 1000, 1002, 1004, 1006, 1008, 1010, 1012, 1014, 1016, 1018, 1020, 1022, 1024, 1026, 1028, 1030, 1032, 1034, 1036, 1038, 1040, 1042, 1044, 1046, 1048, 1050, 1052, 1054, 1056, 1058, 1060, 1062, 1064, 1066, 1068, 1070, 1072, 1074, 1076, 1078, 1080, 1082, 1084, 1086, 1088, 1090, 1092, 1094, 1096, 1098, 1100, 1102, 1104, 1106, 1108, 1110, 1112, 1114, 1116, 1118, 1120, 1122, 1124, 1126, 1128, 1130, 1132, 1134, 1136, 1138, 1140, 1142, or 1144 having a substitution, deletion, and/or insertion of one to six amino acid residues.

[0156] Variants of the HHDH polypeptides of the present invention may be generated using methods that are well known to those having ordinary skill in the art. Libraries of these variants may be generated and screened using the high throughput screen for presence of HHDH activity described in Example 4A. In some instances it may be desirable to identify halohydrin dehalogenases that exhibit activity in the presence of cyanohydrin product inhibitor, e.g., ethyl (R)-4-cyano-3-hydroxybutyrate. A high throughput screen for identifying such enzymes is provided in Example 4B.

[0157] Each of the residue changes to an HHDH polypeptide was evaluated to determine what relationship, if any, existed between the sequence change and the desired function (increased HHDH enzymatic activity). To do so, the sequence changes and resulting enzyme activity in members of a library generated by the method described in WO 00/42561 were evaluated using the method disclosed in U.S. Ser. No. 10/379,378 filed Mar. 3, 2003, entitled “Methods, systems, and software for identifying functional biomolecules” and incorporated herein by reference. Based upon this method, codons encoding important residues at certain positions that appear to correlate favorably to activity were identified and incorporated into the polynucleotides of a subsequently generated combinatorial library. In other words, the polynucleotides encoding the desired change were generated, expressed and then screened. The method is again applied to the resulting sequences and the enzymatic activity of the hits. The results are again utilized to select those residue changes that enhance enzyme activity for programming into the next library. Using this method, the functionality of various sequence changes (and although not characterized, potential structural changes as well) is subject to immediate evaluation. The residue changes at various residue positions that provide for enhanced enzymatic activity relative to the wild-type HHDH are disclosed herein in the sequences and elsewhere as preferred residues at identified positions.

[0158] Those variants exhibiting the presence of HHDH activity can be further characterized in the quantitative HHDH assay described in Example 5A. Variants that exhibit HHDH activity in the presence of product cyanohydrin, e.g., ethyl (R) 4-cyano-3-hydroxybutyrate, may be further characterized using the assay described in Example 5B. Example 5B describes a protocol for assaying for enzymes that are robust with respect to product inhibition. Thus, variant libraries may be readily screened and assayed to identify HHDH polypeptides that are active under conditions that mimic actual process conditions. The present invention provides HHDH polypeptides that exhibit significant activity even in the presence of product, ethyl (R)-4-cyano-3-hydroxybutyrate in the assay described in Example 5B (e.g., SEQ ID NOS: 98, 100, 102, 104, 106, 108, 120, 122, 124, 126, 128, 130, 132, 136, 138, 140, 142, 144, 146, 148, 150, 152, 160, 174, 176, 178, 188, 190, 192, 194, 196, 198, 200, 202, 204, 206, 208, 210, 212, 214, 216, 218, 220, 222, 224, 226, 228, 230, 232, 234, 236, 238, 240, 242, 244, 246, 248, 250, 252, 254, 256, 258, 260, 276, 278, 280, 282, 284, 286, 288, 290, 292, 294, 296, 300, 302, 304, 306, 308, 310, 312, 314, 316, 318, 320, 322, 324, 326, 328, 330, 332, 334, 336, 338, 340, 342, 344, 346, 348, 350, 352, 354, 356, 358, 360, 362, 364, 366, 368, 370, 372, 374, 376, 378, 380, 382, 384, 386, 388, 390, 392, 394, 396, 398, 400, 402, 404, 406, 408, 410, 412, 414, 416, 418, 420, 422, 424, 426, 428, 430, 432, 434, 436, 438, 440, 442, 444, 446, 448, 450, 452, 454, 456, 458, 460, 462, 464, 466, 468, 470, 472, 474, 476, 478, 480, 482, 484, 486, 488, 490, 492, 494, 496, 498, 500, 502, 504, 506, 508, 510, 512, 514, 516, 518, 520, 522, 524, 526, 528, 530, 532, 534, 536, 538, 540, 542, 544, 546, 548, 550, 552, 554, 556, 558, 560, 562, 564, 566, 568, 570, 572, 574, 576, 578, 580, 582, 584, 586, 588, 590, 592, 594, 596, 598, 600, 602, 604, 606, 608, 610, 612, 614, 616, 618, 620, 622, 624, 626, 628, 630, 632, 634, 636, 638, 640, 642, 644, 646, 648, 650, 652, 654, 656, 658, 660, 662, 664, 666, 668, 670, 672, 674, 676, 678, 680, 682, 684, 686, 688, 690, 692, 694, 696, 698, 700, 702, 704, 706, 708, 710, 712, 714, 716, 718, 720, 722, 724, 726, 728, 730, 732, 734, 736, 738, 740, 742, 744, 746, 748, 750, 752, 754, 756, 758, 760, 762, 764, 766, 768, 770, 772, 774, 776, 778, 780, 782, 784, 786, 788, 790, 792, 794, 796, 798, 800, 802, 804, 806, 808, 810, 812, 814, 816, 818, 820, 822, 824, 826, 828, 830, 832, 834, 836, 838, 840, 842, 844, 846, 848, 850, 852, 854, 856, 858, 860, 862, 864, 866, 868, 870, 872, 874, 876, 878, 880, 882, 884, 886, 888, 890, 892, 894, 896, 898, 900, 902, 904, 906, 908, 910, 912, 914, 916, 918, 920, 922, 924, 926, 928, 930, 932, 934, 936, 938, 940, 942, 944, 946, 948, 950, 952, 954, 956, 958, 960, 962, 964, 966, 968, 970, 972, 974, 976, 978, 980, 982, 984, 986, 988, 990, 992, 994, 996, 998, 1000, 1002, 1004, 1006, 1008, 1010, 1012, 1014, 1016, 1018, 1020, 1022, 1024, 1026, 1028, 1030, 1032, 1034, 1036, 1038, 1040, 1042, 1044, 1046, 1048, 1050, 1052, 1054, 1056, 1058, 1060, 1062, 1064, 1066, 1068, 1070, 1072, 1074, 1076, 1078, 1080, 1082, 1084, 1086, 1088, 1090, 1092, 1094, 1096, 1098, 1100, 1102, 1104, 1106, 1108, 1110, 1112, 1114, 1116, 1118, 1120, 1122, 1124, 1126, 1128, 1130, 1132, 1134, 1136, 1138, 1140, 1142, or 1144. Polypeptides that exhibit the ability to convert ethyl (S)-4-chloro-3-hydroxybutyrate to ethyl (R)-4-cyano-3-hydroxybutyrate in the assay of Example 5B, would also demonstrate HHDH activity in the assay of Example 5A.

[0159] Methods for generating variant libraries are well known in the art. For example, mutagenesis and directed evolution methods can be readily applied to polynucleotides (such as, for example, wild-type HHDH encoding polynucleotides or the polynucleotides of the present invention) to generate variant libraries that can be expressed, screened, and assayed using the methods described herein. Mutagenesis and directed evolution methods are well known in the art. See, e.g., Ling, et al., “Approaches to DNA mutagenesis: an overview,” Anal. Biochem., 254(2): 157-78 (1997); Dale, et al., “Oligonucleotide-directed random mutagenesis using the phosphorothioate method,” Methods Mol. Biol., 57:369-74 (1996); Smith, “In vitro mutagenesis,” Ann. Rev. Genet., 19:423-462 (1985); Botstein, et al., “Strategies and applications of in vitro mutagenesis,” Science, 229:1193-1201 (1985); Carter, “Site-directed mutagenesis,” Biochem. J., 237:1-7 (1986); Kramer, et al., “Point Mismatch Repair,” Cell, 38: 879-887 (1984); Wells, et al., “Cassette mutagenesis: an efficient method for generation of multiple mutations at defined sites,” Gene, 34:315-323 (1985); Minshull, et al., “Protein evolution by molecular breeding,” Current Opinion in Chemical Biology, 3:284-290 (1999); Christians, et al., “Directed evolution of thymidine kinase for AZT phosphorylation using DNA family shuffling,” Nature Biotechnology, 17:259-264 (1999); Crameri, et al., “DNA shuffling of a family of genes from diverse species accelerates directed evolution,” Nature, 391:288-291; Crameri, et al., “Molecular evolution of an arsenate detoxification pathway by DNA shuffling,” Nature Biotechnology, 15:436-438 (1997); Zhang, et al., “Directed evolution of an effective fucosidase from a galactosidase by DNA shuffling and screening,” Proceedings of the National Academy of Sciencess, U.S.A., 94:45-4-4509; Crameri, et al., “Improved green fluorescent protein by molecular evolution using DNA shuffling,” Nature Biotechnology 14: 315-319 (1996); Stemmer, “Rapid evolution of a protein in vitro by DNA shuffling,” Nature, 370:389-391 (1994); Stemmer, “DNA shuffling by random fragmentation and reassembly: In vitro recombination for molecular evolution,” Proceedings of the National Academy of Sciences, U.S.A., 91:10747-10751 (1994); WO 95/22625; WO 97/0078; WO 97/35966; WO 98/27230; WO 00/42651; and WO 01/75767.

[0160] In another embodiment, the present invention also provides a fragment of the HHDH polypeptides described herein having HHDH activity that is at least 1.4 fold greater than the activity of Agrobacterium sp. (wild-type) HHDH (SEQ ID NO: 2) in the assay of Example 5A. As used herein, the term “fragment” refers to a polypeptide having a deletion of from 1 to 5 amino acid residues from the carboxy terminus, the amino terminus, or both. Preferably, the deletion is from 1 to 5 residues from the carboxy terminus.

HHDH Polynucleotides

[0161] The present invention provides polynucleotides that encode HHDH polypeptides of the present invention. In a specific embodiment of the present invention, HHDH polynucleotides comprise a nucleic acid that hybridizes under stringent conditions over substantially the entire length of a nucleic acid corresponding to SEQ ID NO: 1, where the polypeptide encoded by the HHDH polynucleotide comprises an amino acid sequence having at least one amino acid residue selected from the group consisting of T at (residue) position 2, A or P or S at position 3, V at position 4, D at position 6, either I or F at position 9, L at position 10, S at position 13, S at position 14, K at position 15, C at position 16, T or R at position 17, either C or S or K at position 20, T at position 24, Q at position 26, F at position 28, T at position 29, A at position 30, L at position 31, G at position 33, R at position 34, L at position 35, N at position 36, H at position 37, D at position 40, L at position 44, P at position 45, either P or A at position 47, N at position 52, V at position 54, R at position 55, D at position 56, K at position 58, G or D at position 61, V at position 63, R at position 72, I at position 75, P at position 76, C at position 78, Y at position 82, either S or L at position 84, A at position 85, E at position 91, D at position 93, Q or G at position 95, N at position 96, K at position 107, A at position 112, either T, S or G at position 114, A at position 115, P at position 117, N at position 120, E at position 121, P at position 122, R at position 126, V at position 130, S at position 133, A or V at position 134, L, W or V at position 136, H at position 139, I or R at position 142, S at position 144, S at position 146, T at position 152, S at position 153, either S or A at position 154, V at position 168, T at position 169, F at position 177, V at position 178, I at position 180, G or I at position 181, K at position 184, Y at position 186, L at position 194, N at position 198, M at position 199, E at position 215, G at position 236, V at position 237, L at position 238, T at position 240, either I or A or V at position 245, Y at position 249, V or I at position 252, and V at position 254, when optimally aligned with SEQ ID NO: 2. The present invention also provides an HHDH polynucleotide, SEQ ID NO: 1, that is codon optimized for expression in E. coli. The polypeptide encoded by this codon optimized polynucleotide corresponds to HHDH polypeptide from Agrobacterium sp. (SEQ ID NO: 2).

[0162] In addition, the present invention provides specific polynucleotides corresponding to SEQ ID NO: 3, 5, 7, 9, 11, 13, 15, 17, 19, 21, 23, 25, 27, 29, 33, 35, 37, 39, 41, 43, 45, 47, 49, 51, 53, 55, 57, 59, 61, 63, 65, 67, 69, 71, 73, 75, 77, 79, 81, 83, 85, 87, 89, 91, 93, 95, 97, 99, 101, 103, 105, 107, 109, 111, 113, 115, 117, 119, 121, 123, 125, 127, 129, 131, 133, 135, 137, 139, 141, 143, 145, 147, 149, 151, 153, 155, 157, 159, 161, 163, 165, 167, 169, 171, 173, 175, 177, 179, 181, 183, 185, 187, 189, 191, 193, 195, 197, 199, 201, 203, 205, 207, 209, 211, 213, 215, 217, 219, 221, 223, 225, 227, 229, 231, 233, 235, 237, 239, 241, 243, 245, 247, 249, 251, 253, 255, 257, 259, 261, 263, 265, 267, 269, 271, 273, 275, 277, 279, 281, 283, 285, 287, 289, 291, 293, 295, 297, 299, 301, 303, 305, 307, 309, 311, 313, 315, 317, 319, 321, 323, 325, 327, 329, 331, 333, 335, 337, 339, 341, 343, 345, 347, 349, 351, 353, 355, 357, 359, 361, 363, 365, 367, 369, 371, 373, 375, 377, 379, 381, 383, 385, 387, 389, 391, 393, 395, 397, 399, 401, 403, 405, 407, 409, 411, 413, 415, 417, 419, 421, 423, 425, 427, 429, 431, 433, 435, 437, 439, 441, 443, 445, 447, 449, 451, 453, 455, 457, 459, 461, 463, 465, 467, 469, 4712, 473, 475, 477, 479, 481, 483, 485, 487, 489, 491, 493, 495, 497, 499, 501, 503, 505, 507, 509, 511, 513, 515, 517, 519, 521, 523, 525, 527, 529, 531, 533, 535, 537, 539, 541, 543, 545, 547, 549, 551, 553, 555, 557, 559, 561, 563, 565, 567, 569, 571, 573, 575, 577, 579, 581, 583, 585, 587, 589, 591, 593, 595, 597, 599, 601, 603, 605, 607, 609, 611, 613, 615, 617, 619, 621, 623, 625, 627, 629, 631, 633, 635, 637, 639, 641, 643, 645, 647, 649, 651, 653, 655, 657, 659, 661, 663, 665, 667, 669, 671, 673, 675, 677, 679, 681, 683, 685, 687, 689, 691, 693, 695, 697, 699, 701, 703, 705, 707, 709, 711, 713, 715, 717, 719, 721, 723, 725, 727, 729, 731, 733, 735, 739, 741, 743, 745, 747, 749, 751, 753, 755, 757, 759, 761, 763, 765, 767, 769, 771, 773, 775, 777, 779, 781, 783, 785, 787, 789, 791, 793, 795, 797, 799, 801, 803, 805, 807, 809, 811, 813, 815, 817, 819, 821, 823, 825, 827, 829, 831, 833, 835, 837, 839, 841, 843, 845, 847, 849, 851, 853, 855, 857, 859, 861, 863, 865, 867, 869, 871, 873, 875, 877, 879, 881, 883, 885, 887, 889, 891, 893, 895, 897, 899, 901, 903, 905, 907, 909, 911, 913, 915, 917, 919, 921, 923, 925, 927, 929, 931, 933, 935, 937, 939, 941, 943, 945, 947, 949, 951, 953, 955, 957, 959, 961, 963, 965, 967, 969, 971, 973, 975, 977, 979, 981, 983, 985, 987, 989, 991, 993, 995, 997, 999, 1001, 1103, 1005, 1007, 1009, 1011, 1013, 1015, 1017, 1019, 1021, 1023, 1025, 1027, 1029, 1031, 1033, 1035, 1037, 1039, 1041, 1043, 1045, 1047, 1049, 1051, 1053, 1055, 1057, 1059, 1061, 1063, 1065, 1067, 1069, 1071, 1073, 1075, 1077, 1079, 1081, 1083, 1085, 1087, 1089, 1091, 1093, 1095, 1097, 1099, 1101, 1103, 1105, 1107, 1109, 1111, 1113, 1115, 1117, 1119, 1121, 1123, 1125, 1127, 1129, 1131, 1133, 1135, 1137, 1139, 1141, and 1143,.

[0163] Those having ordinary skill in the art will readily appreciate that due to the degeneracy of the genetic code, a multitude of nucleotide sequences encoding HHDH polypeptides of the present invention exist. Table I is a Codon Table that provides the synonymous codons for each amino acid. For example, the codons AGA, AGG, CGA, CGC, CGG, and CGU all encode the amino acid arginine. Thus, at every position in the nucleic acids of the invention where an arginine is specified by a codon, the codon can be altered to any of the corresponding codons described above without altering the encoded polypeptide. It is understood that U in an RNA sequence corresponds to T in a DNA sequence.

TABLE 1
Codon Table

| | |
|---|---|
| Amino acids | Codon |

| | | | | | | | | |
|---|---|---|---|---|---|---|---|---|
| Alanine | Ala | A | GCA | GCC | GCG | GCU | | |
| Cysteine | Cys | C | UGC | UGU | | | | |
| Aspartic acid | Asp | D | GAC | GAU | | | | |
| Glutamic acid | Glu E | GAA | GAG | | | | | |
| Phenylalanine | Phe F | UUC | UUU | | | | | |
| Glycine | Gly | G | GGA | GGC | GGG | GGU | | |
| Histidine | His | H | CAC | CAU | | | | |
| Isoleucine | Ile | I | AUA | AUC | AUU | | | |
| Lysine | Lys | K | AAA | AAG | | | | |
| Leucine | Leu | L | UUA | UUG | CUA | CUC | CUG | CUU |
| Methionine | Met | M | AUG | | | | | |
| Asparagine | Asn | N | AAC | AAU | | | | |
| Proline | Pro | P | CCA | CCC | CCG | CCU | | |
| Glutamine | Gln | Q | CAA | CAG | | | | |
| Arginine | Arg | R | AGA | AGG | CGA | CGC | CGG | CGU |
| Serine | Ser | S | AGC | AGU | UCA | UCC | UCG | UCU |
| Threonine | Thr | T | ACA | ACC | ACG | ACU | | |
| Valine | Val | V | GUA | GUC | GUG | GUU | | |
| Tryptophan | Trp | W | UGG | | | | | |
| Tyrosine Tyr | Y | UAC | UAU | | | | | |

[0164] Such “silent variations” are one species of “conservative” variation. One of ordinary skill in the art will recognize that each codon in a nucleic acid (except AUG, which is ordinarily the only codon for methionine) can be modified by standard techniques to encode a functionally identical polypeptide. Accordingly, each silent variation of a nucleic acid which encodes a polypeptide is implicit in any described sequence. The invention contemplates and provides each and every possible variation of nucleic acid sequence encoding a polypeptide of the invention that could be made by selecting combinations based on possible codon choices. These combinations are made in accordance with the standard triplet genetic code (set forth in Table 1), as applied to the polynucleotide sequences of the present invention.

[0165] A group of two or more different codons that, when translated in the same context, all encode the same amino acid, are referred to herein as “synonymous codons.” HHDH polynucleotides of the present invention may be codon optimized for expression in a particular host organism by modifying the polynucleotides to conform with the optimum codon usage of the desired host organism. Those having ordinary skill in the art will recognize that tables and other references providing preference information for a wide range of organisms are readily available See e.g., Henaut and Danchin in “Escherichia coli and Salmonella,” Neidhardt, et al. Eds., ASM Pres, Washington D.C. (1996), pp. 2047-2066.

[0166] An exemplary HHDH variant polynucleotide sequence of the present invention is provided as SEQ ID NO: 31, which expresses well in E. coli. This polynucleotide is a variant of SEQ ID NO: 1 that expresses the polypeptide corresponding to SEQ ID NO: 2 from E. coli at a level of about 4½ fold higher than the amount expressed from SEQ ID NO: 1 (i.e., HHDH-encoding polynucleotide encoding native HHDH from Agrobacterium sp.).

[0167] In some embodiments of the present invention, certain codons are preferred when the following residues are employed in the HHDH polypeptides of the present invention: ATT encoding Isoleucine at amino acid position 5; AAG encoding Lysine at amino acid position 36; ATT encoding Isoleucine at amino acid position 63; GAG encoding Glutamic acid at amino acid position 95; and CCC encoding Proline at amino acid position 188. The amino acid position referred to above is the corresponding amino acid position in SEQ ID NO: 2, when the invention HHDH polypeptides are aligned with SEQ ID NO: 2.

[0168] The terms “conservatively modified variations” and “conservative variations” are used interchangeably herein to refer to those nucleic acids that encode identical or essentially identical amino acid sequences, or in the situation where the nucleic acids are not coding sequences, the term refers to nucleic acids that are identical. One of ordinary skill in the art will recognize that individual substitutions, deletions or additions which alter, add or delete a single amino acid or a small percentage of amino acids in an encoded sequence are considered conservatively modified variations where the alterations result in one or more of the following: the deletion of an amino acid, addition of an amino acid, or substitution of an amino acid with a chemically similar amino acid. When more than one amino acid is affected, the percentage is typically less than 5% of amino acid residues over the length of the encoded sequence, and more typically less than 2%. References providing amino acids that are considered conservative substitutions for one another are well known in the art.

[0169] Examples of conservative substitutions are within the group of basic amino acids (arginine, lysine and histidine), acidic amino acids (glutamic acid and aspartic acid), polar amino acids (glutamine and asparagines), hydrophobic amino acids (leucine, isoleucine and valine), aromatic amino acids (phenylalanine, tryptophan and tyrosine), and small amino acids (glycine, alanine, serine, threonine, proline, cysteine and methionine). Amino acid substitutions which do not generally alter the specific activity are known in the art and are described, for example, by H. Neurath and R. L. Hill, 1979, in “The Proteins,” Academic Press, New York. The most commonly occurring exchanges are Ala/Ser, Val/Ile, Asp/Glu, Thr/Ser, Ala/Gly, Ala/Thr, Ser/Asn, Ala/Val, Ser/Gly, Tyr/Phe, Ala/Pro, Lys/Arg, Asp/Asn, Leu/Ile, Leu/Val, Ala/Glu, and Asp/Gly as well as these in reverse.

[0170] Conservatively substituted variations of the HHDH polypeptides of the present invention include substitutions of a small percentage, typically less than 5%, more typically less than 2%, and often less than 1% of the amino acids of the polypeptide sequence, with a conservatively selected amino acid of the same conservative substitution group. The addition of sequences which do not alter the encoded activity of an HHDH polynucleotide, such as the addition of a non-functional or non-coding sequence, is considered a conservative variation of the HHDH polynucleotide.

[0171] Polynucleotides of the present invention can be prepared using methods that are well known in the art. Typically, oligonucleotides of up to about 120 bases are individually synthesized, then joined (e.g., by enzymatic or chemical ligation methods, or polymerase-mediated methods) to form essentially any desired continuous sequence. For example, polynucleotides of the present invention can be prepared by chemical synthesis using, e.g., the classical phosphoramidite method described by Beaucage, et al. (1981) Tetrahedron Letters, 22:1859-69, or the method described by Matthes, et al. (1984) EMBO J., 3:801-05., e.g., as is typically practiced in automated synthetic methods. According to the phosphoramidite method, oligonucleotides are synthesized, e.g., in an automatic DNA synthesizer, purified, annealed, ligated and cloned in appropriate vectors.

[0172] In addition, essentially any nucleic acid can be custom ordered from any of a variety of commercial sources, such as The Midland Certified Reagent Company (Midland, Tex.), The Great American Gene Company (Ramona, Calif.), ExpressGen Inc. (Chicago, Ill.), Operon Technologies Inc. (Alameda, Calif.), and many others.

[0173] Polynucleotides may also be synthesized by well-known techniques as described in the technical literature. See, e.g., Carruthers, et al., Cold Spring Harbor Symp. Quant. Biol., 47: 411-418 (1982) and Adams, et al., J. Am. Chem. Soc., 105:661 (1983). Double stranded DNA fragments may then be obtained either by synthesizing the complementary strand and annealing the strands together under appropriate conditions, or by adding the complementary strand using DNA polymerase with an appropriate primer sequence.

[0174] General texts which describe molecular biological techniques useful herein, including the use of vectors, promoters and many other relevant topics, include Berger and Kimmel, Guide to Molecular Cloning Techniques, Methods in Enzymology volume 152 Academic Press, Inc., San Diego, Calif. (Berger); Sambrook et al., Molecular Cloning—A Laboratory Manual (2nd Ed.), Vol. 1-3, Cold Spring Harbor Laboratory, Cold Spring Harbor, N.Y., 1989 (“Sambrook”) and Current Protocols in Molecular Biology, F. M. Ausubel et al., eds., Current Protocols, a joint venture between Greene Publishing Associates, Inc. and John Wiley & Sons, Inc., (supplemented through 1999) (“Ausubel”). Examples of protocols sufficient to direct persons of skill through in vitro amplification methods, including the polymerase chain reaction (PCR) the ligase chain reaction (LCR), Qβ-replicase amplification and other RNA polymerase mediated techniques (e.g., NASBA), e.g., for the production of the homologous nucleic acids of the invention are found in Berger, Sambrook, and Ausubel, as well as Mullis et al., (1987) U.S. Pat. No. 4,683,202; PCR Protocols A Guide to Methods and Applications (Innis et al. eds) Academic Press Inc. San Diego, Calif. (1990) (Innis); Arnheim & Levinson (Oct. 1, 1990) C&EN 36-47; The Journal Of NIH Research (1991) 3, 81-94; (Kwoh et al. (1989) Proc. Natl. Acad. Sci. USA 86, 1173; Guatelli et al. (1990) Proc. Natl. Acad. Sci. USA 87, 1874; Lomell et al. (1989) J. Clin. Chem 35, 1826; Landegren et al., (1988) Science 241, 1077-1080; Van Brunt (1990) Biotechnology 8, 291-294; Wu and Wallace, (1989) Gene 4, 560; Barringer et al. (1990) Gene 89, 117, and Sooknanan and Malek (1995) Biotechnology 13: 563-564. Improved methods for cloning in vitro amplified nucleic acids are described in Wallace et al., U.S. Pat. No. 5,426,039. Improved methods for amplifying large nucleic acids by PCR are summarized in Cheng et al. (1994) Nature 369: 684-685 and the references cited therein, in which PCR amplicons of up to 40 kb are generated. One of ordinary skill in the art will readily appreciate that essentially any RNA can be converted into a double stranded DNA suitable for restriction digestion, PCR expansion and sequencing using reverse transcriptase and a polymerase. See, e.g., Ausubel, Sambrook and Berger, all supra.

Vectors, Promoters, and Expression Systems

[0175] The present invention also includes recombinant constructs comprising one or more of the HHDH polynucleotide sequences as broadly described above. The term “construct” or “nucleic acid construct” refers herein to a nucleic acid, either single- or double-stranded, which is isolated from a naturally occurring gene or which has been modified to contain segments of nucleic acids in a manner that would not otherwise exist in nature. The term “nucleic acid construct” is synonymous with the term “expression cassette” when the nucleic acid construct contains the control sequences required for expression of an HHDH coding sequence of the present invention.

[0176] The present invention also provides an expression vector comprising an HHDH polynucleotide of the present invention operably linked to a promoter. Example 1 provides a description of how to make expression constructs for expression of halohydrin dehalogenase. The term “control sequences” refers herein to all the components that are necessary or advantageous for the expression of a polypeptide of the present invention. Each control sequence may be native or foreign to the nucleotide sequence encoding the polypeptide. Such control sequences include, but are not limited to, a leader, polyadenylation sequence, propeptide sequence, promoter, signal peptide sequence, and transcription terminator. At a minimum, the control sequences include a promoter, and transcriptional and translational stop signals. The control sequences may be provided with linkers for the purpose of introducing specific restriction sites facilitating ligation of the control sequences with the coding region of the nucleotide sequence encoding a polypeptide.

[0177] The term “operably linked” refers herein to a configuration in which a control sequence is appropriately placed at a position relative to the coding sequence of the DNA sequence such that the control sequence directs the expression of a polypeptide.

[0178] When used herein, the term “coding sequence” is intended to cover a nucleotide sequence, which directly specifies the amino acid sequence of its protein product. The boundaries of the coding sequence are generally determined by an open reading frame, which usually begins with the ATG start codon. The coding sequence typically includes a DNA, cDNA, and/or recombinant nucleotide sequence.

[0179] As used herein, the term “expression” includes any step involved in the production of the polypeptide including, but not limited to, transcription, post-transcriptional modification, translation, post-translational modification, and secretion.

[0180] The term “expression vector” refers herein to a DNA molecule, linear or circular, that comprises a segment encoding a polypeptide of the invention, and which is operably linked to additional segments that provide for its transcription.

[0181] As used herein, the term “host cell” refers to any cell type which is susceptible to transformation with a nucleic acid construct.

[0182] Nucleic acid constructs of the present invention comprise a vector, such as, a plasmid, a cosmid, a phage, a virus, a bacterial artificial chromosome (BAC), a yeast artificial chromosome (YAC), or the like, into which a nucleic acid sequence of the invention has been inserted, in a forward or reverse orientation. In a preferred aspect of this embodiment, the construct further comprises regulatory sequences, including, for example, a promoter, operably linked to the sequence. Large numbers of suitable vectors and promoters are known to those of skill in the art, and are commercially available.

[0183] Polynucleotides of the present invention can be incorporated into any one of a variety of expression vectors suitable for expressing a polypeptide. Suitable vectors include chromosomal, nonchromosomal and synthetic DNA sequences, e.g., derivatives of SV40; bacterial plasmids; phage DNA; baculovirus; yeast plasmids; vectors derived from combinations of plasmids and phage DNA, viral DNA such as vaccinia, adenovirus, fowl pox virus, pseudorabies, adenovirus, adeno-associated virus, retroviruses and many others. Any vector that transduces genetic material into a cell, and, if replication is desired, which is replicable and viable in the relevant host can be used.

[0184] When incorporated into an expression vector, a polynucleotide of the invention is operatively linked to an appropriate transcription control sequence (promoter) to direct mRNA synthesis, e.g., T5 promoter. Examples of such transcription control sequences particularly suited for use in transgenic plants include the cauliflower mosaic virus (CaMV) and figwort mosaic virus (FMV). Other promoters known to control expression of genes in prokaryotic or eukaryotic cells or their viruses and which can be used in some embodiments of the invention include SV40 promoter, E. coli lac or trp promoter, phage lambda P_{L} promoter, tac promoter, T7 promoter, and the like. An expression vector optionally contains a ribosome binding site for translation initiation, and a transcription terminator, such as PinII. The vector also optionally includes appropriate sequences for amplifying expression, e.g., an enhancer.

[0185] In addition, the expression vectors of the present invention optionally contain one or more selectable marker genes to provide a phenotypic trait for selection of transformed host cells. Suitable marker genes include those coding for resistance to the antibiotic spectinomycin or streptomycin (e.g., the aada gene), the streptomycin phosphotransferase (SPT) gene coding for streptomycin resistance, the neomycin phosphotransferase (NPTII) gene encoding kanamycin or geneticin resistance, the hygromycin phosphotransferase (HPT) gene coding for hygromycin resistance. Additional selectable marker genes include dihydrofolate reductase or neomycin resistance for eukaryotic cell culture, and tetracycline or ampicillin resistance in E. coli.

[0186] An exemplary expression vector for the expression of HHDH polypeptides of the present invention is depicted in FIG. 1. Vectors of the present invention can be employed to transform an appropriate host to permit the host to express an invention protein or polypeptide. Examples of appropriate expression hosts include bacterial cells, such as E. coli, B. subtilis, and Streptomyces. In bacterial systems, a number of expression vectors may be selected, such as, for example, multifunctional E. coli cloning and expression vectors.

[0187] HHDH polynucleotides of the invention can also be fused, for example, in-frame to nucleic acids encoding a secretion/localization sequence, to target polypeptide expression to a desired cellular compartment, membrane, or organelle of a cell, or to direct polypeptide secretion to the periplasmic space or into the cell culture media. Such sequences are known to those of skill, and include secretion leader peptides, organelle targeting sequences (e.g., nuclear localization sequences, endoplasmic reticulum (ER) retention signals, mitochondrial transit sequences, chloroplast transit sequences), membrane localization/anchor sequences (e.g., stop transfer sequences, GPI anchor sequences), and the like.

Expression Hosts

[0188] The present invention also relates to engineered host cells that are transduced (transformed or transfected) with a vector or construct of the invention (e.g., an invention cloning vector or an invention expression vector), as well as the production of polypeptides of the invention by recombinant techniques. The vector may be, for example, a plasmid, a viral particle, a phage, etc. The host cell can be a eukaryotic cell, such as a plant cell. Alternatively, the host cell can be a prokaryotic cell, such as a plant cell. Introduction of the construct into the host cell can be effected by calcium phosphate transfection, DEAE-Dextran mediated transfection, electroporation, or other common techniques (Davis, L., Dibner, M. and Battey, I. (1986) Basic Methods in Molecular Biology). The engineered host cells can be cultured in conventional nutrient media modified as appropriate for activating promoters, selecting transformants, or amplifying the HHDH polynucleotide. Culture conditions, such as temperature, pH and the like, are those previously used with the host cell selected for expression, and will be apparent to those skilled in the art and in the references cited herein, including, e.g., Sambrook, Ausubel and Berger, as well as e.g., Freshney (1994) Culture of Animal Cells a Manual of Basic Technique, third edition, Wiley-Liss, New York and the references cited therein.

[0189] HHDH polypeptides of the invention can be produced in non-animal cells such as plants, yeast, fungi, bacteria, and the like. In addition to Sambrook, Berger and Ausubel, details regarding non-animal cell culture can be found in Payne et al. (1992) Plant Cell and Tissue Culture in Liquid Systems John Wiley & Sons, Inc. New York, N.Y.; Gamborg and Phillips (eds) (1995) Plant Cell, Tissue and Organ Culture; Fundamental Methods Springer Lab Manual, Springer-Verlag (Berlin Heidelberg N.Y.) and Atlas and Parks (eds) The Handbook of Microbiological Media (1993) CRC Press, Boca Raton, Fla. The host cell can be a eukaryotic cell, such as a plant cell. Alternatively, the host cell can be a prokaryotic cell, such as a bacterial cell. Introduction of the construct into the host cell can be effected by calcium phosphate transfection, DEAE-Dextran mediated transfection, electroporation, or other common techniques (Davis, L., Dibner, M., and Battey, I. (1986) Basic Methods in Molecular Biology).

Fusion Polypeptides for Purification

[0190] HHDH polypeptides of the present invention may also be expressed as part of a fusion polypeptide to facilitate purification of the encoded HHDH polypeptide. Polynucleotides encoding such fusion polypeptides comprise a nucleic acid sequence corresponding to an HHDH polynucleotide of the present invention that is fused-in frame to a purification facilitating domain. As used herein, the term “purification facilitating domain” refers to a domain that mediates purification of the polypeptide to which it is fused. Suitable purification domains include metal chelating peptides, histidine-tryptophan modules that allow purification on immobilized metals, a sequence which binds glutathione (e.g., GST), a hemagglutinin (HA) tag (corresponding to an epitope derived from the influenza hemagglutinin protein; Wilson et al. (1984) Cell, 37:767), maltose binding protein sequences, the FLAG epitope utilized in the FLAGS extension/affinity purification system (Immunex Corp, Seattle, Wash.), and the like. The inclusion of a protease-cleavable polypeptide linker sequence between the purification domain and the HHDH polypeptide is useful to facilitate purification. One expression vector contemplated for use in the compositions and methods described herein provides for expression of a fusion protein comprising a polypeptide of the invention fused to a polyhistidine region separated by an enterokinase cleavage site. The histidine residues facilitate purification on IMIAC (immobilized metal ion affinity chromatography, as described in Porath et al. (1992) Protein Expression and Purification 3:263-281) while the enterokinase cleavage site provides a means for separating the HHDH polypeptide from the fusion protein. pGEX vectors (Promega; Madison, Wis.) may also be used to express foreign polypeptides as fusion proteins with glutathione S-transferase (GST). In general, such fusion proteins are soluble and can easily be purified from lysed cells by adsorption to ligand-agarose beads (e.g., glutathione-agarose in the case of GST-fusions) followed by elution in the presence of free ligand.

Production and Recovery of HHDH Polypeptides

[0191] The present invention further provides a method of making an HHDH polypeptide, said method comprising: (a) cultivating a host cell transformed with an HHDH polynucleotide under conditions suitable for the production of the HHDH polypeptide; and (b) recovering the HHDH polypeptide. Typically, recovery is from the host cell culture medium, the host cell or both, using protein recovery techniques that are well known in the art, including those described below.

[0192] Following transduction of a suitable host strain and growth (cultivating) of the host strain to an appropriate cell density, the selected promoter is induced by appropriate means (e.g., temperature shift or chemical induction) and cells are cultured for an additional period. Cells are typically harvested by centrifugation, disrupted by physical or chemical means, and the resulting crude extract retained for further purification. Microbial cells employed in expression of proteins can be disrupted by any convenient method, including freeze-thaw cycling, sonication, mechanical disruption, or use of cell lysing agents, or other methods, which are well known to those skilled in the art.

[0193] As noted, many references are available for the culture and production of many cells, including cells of bacterial, plant, animal (especially mammalian) and archebacterial origin. See e.g., Sambrook, Ausubel, and Berger (all supra), as well as Freshney (1994) Culture of Animal Cells, a Manual of Basic Technique, third edition, Wiley-Liss, New York and the references cited therein; Doyle and Griffiths (1997) Mammalian Cell Culture: Essential Techniques John Wiley and Sons, NY; Humason (1979) Animal Tissue Techniques, fourth edition W.H. Freeman and Company; and Ricciardelli, et al., (1989) In vitro Cell Dev. Biol. 25:1016-1024. For plant cell culture and regeneration, Payne et al. (1992) Plant Cell and Tissue Culture in Liquid Systems John Wiley & Sons, Inc. New York, N.Y.; Gamborg and Phillips (eds) (1995) Plant Cell, Tissue and Organ Culture; Fundamental Methods Springer Lab Manual, Springer-Verlag (Berlin Heidelberg N.Y.); Jones, ed. (1984) Plant Gene Transfer and Expression Protocols, Humana Press, Totowa, N.J. and Plant Molecular Biology (1993) R. R. D. Croy, Ed. Bios Scientific Publishers, Oxford, U.K. ISBN 0 12 198370 6. Cell culture media in general are set forth in Atlas and Parks (eds.) The Handbook of Microbiological Media (1993) CRC Press, Boca Raton, Fla. Additional information for cell culture is found in available commercial literature such as the Life Science Research Cell Culture Catalogue (1998) from Sigma-Aldrich, Inc (St Louis, Mo.) (“Sigma-LSRCCC”) and, e.g., The Plant Culture Catalogue and supplement (1997) also from Sigma-Aldrich, Inc (St Louis, Mo.) (“Sigma-PCCS”).

[0194] HHDH polypeptides of the present invention can be recovered and purified from recombinant cell cultures by any of a number of methods well known in the art, including ammonium sulfate or solvent (e.g., ethanol, acetone, and the like) precipitation, acid extraction, anion or cation exchange chromatography, phosphocellulose chromatography, hydrophobic interaction chromatography, affinity chromatography (e.g., using any of the tagging systems noted herein), hydroxylapatite chromatography, and lectin chromatography. Protein refolding steps can be used, as desired, in completing the configuration of the mature protein. Finally, high performance liquid chromatography (HPLC) can be employed in the final purification steps. In addition to the references noted supra, a variety of purification methods are well known in the art, including, e.g., those set forth in Sandana (1997) Bioseparation of Proteins, Academic Press, Inc.; Bollag et al. (1996) Protein Methods, 2^{nd} Edition, Wiley-Liss, NY; Walker (1996) The Protein Protocols Handbook Humana Press, NJ; Harris and Angal (1990) Protein Purification Applications: A Practical Approach, IRL Press at Oxford, Oxford, England; Harris and Angal Protein Purification Methods: A Practical Approach, IRL Press at Oxford, Oxford, England; Scopes (1993) Protein Purification: Principles and Practice 3^{rd} Edition, Springer Verlag, NY; Janson and Ryden (1998) Protein Purification: Principles, High Resolution Methods and Applications Second Edition, Wiley-VCH, NY; and Walker (1998) Protein Protocols on CD-ROM, Humana Press, NJ.

[0195] In some cases, it may be desirable to produce the HHDH polypeptides of the invention on a large scale suitable for industrial and/or commercial applications. In such cases, bulk fermentation procedures are employed. An exemplary bulk fermentation procedure for producing HHDH is provided in Example 2. Briefly, an HHDH polynucleotide is cloned into an expression vector, such as, for example, the vector depicted in FIG. 1 (PCK110700). After inserting the polynucleotide of interest into a vector, the vector is tranformed into a bacterial host, such as, for example, E. coli BL21 (Strategene, La Jolla, Calif.) after passage through E. coli TOP10 (Invitrogen, Carlsbad, Calif.) using standard methods.

[0196] The transformed cells are cultivated in a nutrient medium suitable for production of the polypeptide using methods that are known in the art. For example, the cell may be cultivated by shake flask cultivation, small-scale or large-scale fermentation (including continuous, batch, fed-batch, or solid state fermentations) in laboratory or industrial fermentors performed in a suitable medium and under conditions allowing the polypeptide to be expressed and/or isolated. The cultivation takes place in a suitable nutrient medium comprising carbon and nitrogen sources and inorganic salts, using procedures known in the art. Suitable media are available from commercial suppliers or may be prepared according to published compositions (e.g., in catalogues of the American Type Culture Collection). The secreted polypeptide can be recovered directly from the nutrient (culture) medium.

[0197] The resulting polypeptide may be isolated by methods known in the art. For example, the polypeptide may be isolated from the nutrient medium by conventional procedures including, but not limited to, centrifugation, filtration, extraction, spray-drying, evaporation, or precipitation. The isolated polypeptide may then be further purified by a variety of procedures known in the art including, but not limited to, chromatography (e.g., ion exchange, affinity, hydrophobic, chromatofocusing, and size exclusion), electrophoretic procedures (e.g., preparative isoelectric focusing), differential solubility (e.g., ammonium sulfate precipitation), or extraction (see, e.g., Bollag et al. (1996) Protein Methods, 2^{nd} Edition, Wiley-Liss, NY; Walker (1996) The Protein Protocols Handbook, Humana Press, NJ; and Bollag et al. (1996) Protein Methods, 2^{nd} Edition, Wiley-Liss, NY. A procedure for recovering the HHDH polypeptide from a cell lysate is illustrated in Example 3.

[0198] It is believed that the pI of the wild-type HHDH of SEQ ID NO: 2 maybe too low for polyethyleneimine (PEI) precipitation to be used to purify HHDH from DNA. Applicants have discovered that they could make the following residue changes relative to the alignment in SEQ ID NO: 2 to produce HHDH polypeptides of the present invention that have a sufficiently high pI to allow for isolation by PEI precipitation, but without loss of HHDH enzyme activity: E40Q,K, E42Q,K, E46Q,K, E56Q,K, E58Q,K, E61Q,K, and E64Q,K. Thus, in another embodiment, the present invention is directed to an HHDH polypeptide that can be isolated from solution by PEI precipitation, the HHDH polypeptide, when aligned with SEQ ID NO: 2, having five or more of the residue changes selected from the group consisting of E40Q or K, E42Q or K, E46Q or K, E56Q or K, E58Q or K, E61Q or K, and E64Q or K. For example, PEI precipitation was applied to the HHDH polypeptide of SEQ ID NO: 744:

MSTAIVTNVKHFGGMGSALRLSEAGHTVACHDESFKHQDQLKAFAKTYPQ
LIPMSEQEPAELIEAVTSALGQVDVLVSNDIYPVEWRPIDKYAVEDYRGT
VEALQIKPFALVNAVASQMKKRKSGHIIFITSAAPFGPWKELSTYSSARA
GASALANALSKELGEYNIPVFAIAPNYLHSGDSPYYYPTEPWKTSPEHVA
HVRKVTALQRLGTQKELGELVAFLASGSCDYLTGQVFWLTGGFPVIERWP
GMPE.

[0199] This polypeptide is encoded by the polynucleotide of SEQ ID NO: 743:

atgagcaccgctattgtcaccaacgtcaaacattttggaggtatgggtag
cgctctgcgtctgagcgaagctggtcataccgtcgcttgccatgatgaaa
gctttaagcatcaggatcaactgaaagcttttgctaaaacctacccacag
ctgatcccaatgagcgaacaggaaccagctgaactgattgaagctgtcac
cagcgctcttggtcaggtcgatgtactggtcagcaacgatatctatcctg
tggaatggcggccaatcgataaatacgctgtcgaggattacaggggtact
gtcgaagctctgcagatcaagccatttgctctagtgaatgctgtcgcttc
gcaaatgaagaagcgaaagtcggggcacatcatcttcatcacttcggctg
ccccgttcgggccatggaaggagctatcgacttactcttcggctcgagct
ggggctagtgcactagctaatgctctatcgaaggagctaggagagtacaa
tatcccggtgttcgctatcgctccgaattacctacactcgggggattcgc
cgtactattaccccactgagccgtggaagacttctccggagcacgtggct
cacgtgcgtaaggtgactgctctacaacgactagggactcaaaaagagct
gggggaattggtggcatttttggcatctggctcttgtgattatttgactg
gccaggtgttttggttgacaggcggctttcccgtcatcgaacgttggccc
ggcatgcccgaataatgaggatccggccaaactgttgtccgtctgcatca
cctctaggtaatgtgagcggatacgatgccc.

[0200] Cell-free transcription/translation systems can also be employed to produce HHDH polypeptides using the polynucleotides of the present invention. Several such systems are commercially available. A general guide to in vitro transcription and translation protocols is found in Tymms (1995) In vitro Transcription and Translation Protocols: Methods in Molecular Biology, Volume 37, Garland Publishing, NY.

[0201] Ethyl-4-chloroacetoacetate (ECAA) is the substrate for the coupled reduction reaction using KRED/GDH to produce ethyl (S)-4-chloro-3-hydroxybutyrate (ECHB). The ECHB is then used as substrate for the HHDH reaction. However, the ECAA starting material is a potent inhibitor (Kᵢ approximately=70 μM) of HHDH. Because the KRED/GDH catalyzed reaction may go to 99.9% completion, instead of the desired 99.97%, then 0.1% ECAA remains in the ECHB material and this 0.1% ECAA can inhibit the HHDH reaction. In other words, the remaining substrate from the first reaction is an inhibitor in the second reaction. Hence, it is desirable that the HHDH polypeptides of the present invention have resistance to inhibition by ECAA.

[0202] Applicants have discovered that they could make the following residue changes relative to the alignment in SEQ ID NO: 2 to produce HHDH polypeptides of the present invention that demonstrate increased resistance against inhibition by ECAA: A4V, A82Y, A134V, G136W, G136V, L142R, L178V, W238L, A240T, W249Y, M2521. Thus, in another embodiment, the present invention is directed to an HHDH polypeptide is resistant to inhibition by ECAA, the HHDH polypeptide, when aligned with SEQ ID NO: 2, having one or more of the residue changes selected from the group consisting of A4V, F82Y, T134V, F136W, F136V, L142R, L178V, W238L, A240T, W249Y and M2521.

[0203] A method for testing the HHDH polypeptides of the present invention for their reactivity in the presence of ECAA is disclosed in Example 5C herein. A gas chromatographic method for screening the reaction products from Example 5C, and determining the amount of product produced, is disclosed in Example 6B herein.

Methods of Using HHDH Polypeptides

[0204] As described supra, HHDH polypeptides of the present invention can be used to catalyze the conversion of 4-halo-3-hydroxybutyric acid derivatives to 4-nucleophile substituted-3-hydroxybutyric acid derivatives. The novel halohydrin dehalogenases of the present invention are also useful in the process for enzymatically resolving a mixture of enantiomeric epoxides by reacting the mixture with an anionic nucleophile in the presence of the halohydrin dehalogenase, wherein the enzyme preferentially reacts one of the epoxide enantiomers with the nucleophile to form a mixture of the resulting enantiomerically enriched vicinal nucleophile-substituted alcohol and the unreacted epoxide enriched in the other enantiomer, in the manner disclosed in publication WO 01/90397, which is incorporated herein by reference in its entirety.

[0205] The foregoing and other aspects of the invention may be better understood in connection with the following non-limiting examples.

### EXAMPLES

### Example 1

### Construction of Expression Constructs for Expression of Halohydrin Dehalogenase

[0206] The gene for Agrobacterium sp. halohydrin dehalogenase was codon optimized (SEQ ID NO: 1) for expression in E. coli based on the amino acid sequence of the halohydrin dehalogenase from Agrobacterium sp. (SEQ ID NO: 2). The gene was synthesized using 60-mer oligomers, and cloned into expression vector PCK110700 (depicted in FIG. 1) under the control of a T5 promoter. The vector was transformed into E. coli TOP10 (Invitrogen, Carlsbad, Calif.) from which plasmid DNA was prepared using standard methods. The plasmid DNA was then transformed into E. coli BL21 (Stratagene, La Jolla, Calif.), the expression host, using standard methods. A clone was found in the expression library that expressed active HHDH. The gene from this clone was sequenced (see SEQ ID NO: 1 (HHDH.1)) and found to encode Agrobacterium sp. HHDH (SEQ ID NO: 2).

[0207] Polynucleotides encoding halohydrin dehalogenases of the present invention were similarly cloned into vector PCK 110700, depicted in FIG. 1, then transformed and expressed from E. coli BL21 after passage through E. coli TOP10 using standard methods.

### Example 2

### Production of HHDH

[0208] In an aerated agitated fermentor, 10.0L of growth medium containing 0.528 g/L ammonium sulphate; 7.5 g/L of di-potassium hydrogen phosphate trihydrate; 3.7 g/L of potassium dihydrogen phosphate; 2 g/L of Tastone-154 yeast extract; 0.05 g/L ferrous sulphate; and 3 ml/L of a trace element solution containing 2 g/L of calcium chloride dihydrate, 2.2 g/L of zinc sulfate septahydrate, 0.5 g/L manganese sulfate monohydrate, 1 g/L cuprous sulfate heptahydrate: 0.1 g/L sodium borate decahydrate and 0.5 g/L EDTA, was brought to a temperature of 30° C. The fermentor was inoculated with a late exponential culture of Escherchia coli BL21 (Stratagene, La Jolla, Calif.) equipped with plasmid containing HHDH polynucleotides as described in Example 1, then grown in a shake flask containing LB, 1% glucose (Sigma Chemical Co., St. Louis, Mo.), and 30 μg/ml chloroamphenicol (Sigma Chemical Co., St. Louis, Mo.) to a starting optical density at 600 nm (OD₆₀₀) of 0.5 to 2.0. The fermentor was agitated at 500-1500 rpm and air was supplied to the fermentation vessel at 1.0-15.0 L/min to maintain a dissolved oxygen level of 30% saturation or greater. The pH of the culture was controlled at 7.0 by addition of 20% v/v ammonium hydroxide. After the culture reached an OD₆₀₀ of 40, the temperature was maintained at 30° C. and the expression of halohydrin dehalogenase was induced by the addition of isopropyl-β-D-thiogalactoside (IPTG) (Sigma Chemical Corp., St. Louis, Mo.) to obtain a final concentration of 1 mM. The culture was grown for another 15 hours. After the induction, the cells were harvested by centrifugation and washed with 10 mM potassium phosphate buffer, pH 7.0. The cell paste was used directly in the downstream recovery process or was stored at −80° C. until use.

### Example 3

### Enzyme Preparation

[0209] The cell paste from Example 2 was washed by suspending 1 volume wet weight of cell paste in 3 volumes of 100 mM Tris/sulfate (pH 7.2) followed by centrifugation at 5000 g for 40 minutes in a Sorval 12BP. The washed cell paste was suspended in 2 volumes of 100 mM Tris/sulfate (pH 7.2). The intracellular HHDH was released from the cells by passing the suspension through a homogenizer in two passes using a pressure of 14,000 psig for the first pass and 8,000 psig for the second pass. The cell lysate was allowed to cool to 4° C. between passes through the homogenizer. The lysate is warmed to room temperature and then either 2.5M MnSO₄ (50-350 mM final concentration), or a 10% w/v solution of polyethyleneimine (PEI), pH 7.2, (0.6-1.0% w/v final concentration) was added to the lysate and stirred for 30 minutes. The homogenate was centrifuged at between 5,000 and 10,000 g in a standard laboratory centrifuge for 30 to 60 minutes. The supernatant was desalted, concentrated by ultrafiltration, dispensed in shallow containers, frozen at −20° C. and lyophilized to a powder that was stored at −80° C.

[0210] To assess the quality of the preparation after fermentation, cell lysate containing the expressed halohydrin dehalogenase enzyme was assayed according to the following protocol. Approximately 50 μl of clarified cell lysate in 100 mM Tris-SO₄, 100 mM NaCN, pH 8.0 was mixed with 10 mM ethyl-(S)-4-chloro-3-hydroxybutyrate (ECHB) (Sigma Aldrich, St. Louis, Mo.). The total reaction volume was 0.2 ml. The reaction was incubated at room temperature for 30 min to 1 hour. The reaction was extracted with 7 volumes of ethyl acetate and the organic layer removed to a 1.8 ml gas chromatography (GC) vial. The organic layer was analyzed by GC for presence of the ethyl-(R)-4-cyano-3-hydroxybutyrate product. The amount of product produced was determined by comparison to a standard curve prepared and analyzed under the same conditions.

### Example 4

### High Throughput Screen for Presence of HHDH Activity

A. No Cyanohydrin in Agarose

[0211] The following screen was used to ascertain the presence of HHDH activity. On day 1, freshly transformed colonies on a Q-tray (Genetix USA, Inc. Beaverton, Oreg.) containing 200 ml LB agar+1% glucose, 30 μg/ml chloramphenicol were picked using a Q-bot® robot colony picker (Genetix USA, Inc., Beaverton, Oreg.) into shallow 384 well Nunc plates containing media (70 μL/well 2×YT+1% glucose, 30 μg/ml chloramphenicol) (Nalge Nunc International, Rochester, N.Y.) for overnight growth at 30° C., 250 revolutions per minute (rpm), 85% relative humidity (RH). A negative control (E. coli BL21 with empty vector) and a positive control (E. coli BL21 with vector containing HHDH Mz1/2G5, SEQ ID NO: 31) were included. These master well plate cultures were covered with AirPore™ microporous tape (Qiagen, Inc., Valencia, Calif.).

[0212] On day 2, the master plate cultures were gridded onto nylon membranes (Pall Biodyne B Nylon Membrane pre-cut for Omnitray, 115×76 mm, Nalge Nunc #250385) then placed onto a Q-tray (Genetix USA, Inc. Beaverton, Oreg.) containing 200 ml LB agar+1% glucose, 30 μg/ml chloramphenicol. The Q-trays were incubated at 30° C. for 8-12 hours until growth was detected. Each nylon membrane was transferred to a Q-tray containing inducing media: 200 ml LB agar+1 mM IPTG, 30 μg/ml chloramphenicol. The Q-trays were then incubated at 23° C. or room temperature overnight.

[0213] On day 3, the assay plate was prepared as follows: a solution of 150 ml of 10 mM Tris-SO₄, pH 7.0, and 1.0% low melt agarose was prepared and cooled to about 45° C. 5M NaCl was added to give a final concentration of 500 mM NaCl. Bromcresol purple (BCP) and ethyl (S)-4-chloro-3-hydroxybutyrate (ECHB) were added to final concentrations of 0.004% and 0.3%, respectively. The solution was poured into a 150 ml Q-tray and allowed to solidify.

[0214] The nylon membrane with the colonies was removed from the Q tray containing inducing media and inverted onto the assay plate. The membrane was imaged through the inverted Q-tray using the Alpha Imaging ChemStation (Alpha Innotech Corporation, San Leandro, Calif.), aperture setting of 4 with a 420 nm (+/−10 nm filter). An image was acquired during the first hour of the reaction. The intensity data for each imaged spot was then normalized to the value of the negative control spots. A normalized value greater than one indicated the presence of HHDH activity. Active clones from this screen were further characterized using the method described in Example 5A. Clones from this screen may also be further characterized using the medium throughput assay described in Example 5B.

B. Cyanohydrin in Agarose

[0215] This high throughput screen is used when it is desired to screen for HHDH polypeptides that exhibit HHDH activity in the presence of cyanohydrin product, e.g., ethyl (R)-4-cyano-3-hydroxybutyrate. The protocols for days one and two are the same as recited in part A. On day 3, the assay plate was prepared as follows: a 150 ml low melt agarose solution was made up as follows: 10 mM Tris, pH 7.0, 2.0% low melt agarose (melted in microwave), 0.004% bromcresol purple (1.2 ml/150 ml). The solution was cooled to 37° C. overnight. On day three, ECHB (0.45 ml ECHB/150 ml solution) and ethyl (R)-4-cyano-3-hydroxybutyrate (8.26 ml ethyl (R)-4-cyano-3-hydroxybutyrate/150 ml solution) were added to give a 0.3% ECHB and 400 mM ethyl (R)-4-cyano-3-hydroxybutyrate solution. The solution was mixed and poured into a 150 ml Q-tray, then allowed to solidify as described in part A.

[0216] The nylon membrane with the colonies was removed from the Q tray containing the inducing media and inverted onto the assay plate. The membrane was imaged as described in part A above.

[0217] Active clones from this screen were further characterized using the gas chromatography method described in Example 5B (Medium through-put assay).

### Example 5

### Characterization of Halohydrin Dehalogenase Activity

A. Gas Chromatography Method for Detection of Product Ethyl-(R)-4-cyano-3-hydroxybutyrate

[0218] To a solution of ethyl (S)-4-chloro-3-hydroxybutyrate (10 mM-100 mM) in 500 mM HCN (500 mM NaCN adjusted to pH 7.0 with phosphoric acid) was added the halohydrin dehalogenase enzyme as a predissolved solution in the same buffer. Over time, aliquots of the mixture were withdrawn and extracted with three volumes of ethyl acetate. The organic layer was then analysed for ethyl (R)-4-cyano-3-hydroxybutyrate by gas chromatography (GC), as described hereinbelow in Example 6. Samples were taken at various time points, and the peak area of the product cyanohydrin, ethyl (R)-4-cyano-3-hydroxybutyrate, was plotted as a function of time. Time points are selected at low conversion, for example, less than 5% conversion, to avoid the effect of product inhibition (e.g., 0.5%, 1.0%, 1.5%, 2.0%, 2.5%, 3.0%, etc.). The peak areas were converted to concentration units using a standard curve that was prepared for the ethyl (R)-4-cyano-3-hydroxybutyrate. Activity of the halohydrin dehalogenase was determined in units of μmol (cyanohydrin produced)/min/mg (total halohydrin dehalogenase catalyst). Relative activities of some of the clones are shown in Table 2, computed as Activity of Improved HHDH Enzyme/Activity of Agrobacterium sp. HHDH (SEQ ID NO: 2).

TABLE 2
Relative HHDH Activity of Improved
HHDH Enzymes on ECHB Substrate

| | Fold Improvement in HHDH Activity over |
|---|---|
| SEQ ID NO: | Agrobacterium sp. HHDH (SEQ ID NO: 2) |
| (SEQ ID NO: 4) | 1.5 |
| (SEQ ID NO: 6) | 1.6 |
| (SEQ ID NO: 8) | 1.8 |
| (SEQ ID NO: 10) | 1.7 |
| (SEQ ID NO: 34) | 2.4 |
| (SEQ ID NO: 12) | 2.5 |
| (SEQ ID NO: 14) | 1.4 |
| (SEQ ID NO: 16) | 2.0 |
| (SEQ ID NO: 18) | 2.7 |
| (SEQ ID NO: 20) | 3.8 |
| (SEQ ID NO: 22) | 2.5 |
| (SEQ ID NO: 24) | 3.2 |
| (SEQ ID NO: 26) | 1.7 |
| (SEQ ID NO: 28) | 2.2 |
| (SEQ ID NO: 30) | 2.8 |

B. Medium Throughput-Gas Chromatography Assay in Presence of Cyanohydrin

[0219] Product

[0220] Hits were picked from desired wells (10 μL of culture) in the prescreen master well plates and transferred into the wells of 96 well NUNC plates (each well containing 200 ul LB+1% glucose, 30 μg/ml chloramphenicol (cam)) for overnight growth at 30° C., 250 rpm, 85% relative humidity. The positive controls were picked from the prescreen master well plates.

[0221] The next day, 10 μl aliquots of the overnight growth was subcultured into 96 deep well plates each well containing 300 μl 2×YT, 100 mM NaH₂PO₄/Na₂HPO₄ pH 7, 1 mM MgSO₄, 30 μg/ml cam. These plates were incubated at 30° C., 250 rpm, 85% relative humidity, 2-4 hrs, until the cell density reached an OD 600 nm=0.6. The plates were then induced with 1 mM isopropyl-β-D-thiogalactoside (IPTG) (e.g., 10 μl/well of a 34 mM IPTG stock solution or 30 uL/well of 10 mM IPTG stock) and incubated at 30° C. overnight, 250 rpm, 85% relative humidity.

[0222] The next day, the plates were centrifuged (4000 rpm, 10 min., 4° C.) to pellet the cells and the spent media was discarded. The plates can be frozen at −80° C. for one hour to aid in cell breakage.

[0223] The pelleted cells were lysed by adding 200 μL B-PER® lysing solution (Pierce, cat# 78243) containing 2.04 M ethyl-4-cyano-3-hydroxybutyrate (“NH”) (320 g/L)(fw=157, d 1.19, 26.8 ml/100 ml lysis mixture) and 1 ul/10 ml DNase (˜200 U/ul). The mixture of cells and lysing solution was vortexed to resuspend the cells and then incubated at 50° C. with shaking for two hours.

[0224] A reaction solution was made up in a fume hood, preferably using a plastic (polypropylene) disposal container. The volume of reaction solution was determined by number of plates screened. To prepare the reaction solution having a 1M final concentration of NaCN, NaCN (fw=49.01, 4.9 g/100 mL) was added to the desired volume of 100 mM sodium phosphate pH 7 to give a 1.47M concentration of NaCN. To each 68 mL of the NaCN solution was added 24 mL of 5M stock NaCl and 8 ml of concentrated HCl (10 M) to produce the desired volume of reaction mixture that was 1.2 M NaCl, 800 mM HCl, and 1M NaCN. The final pH of the reaction mixture was 7.0-7.2. To this solution was added ECHB (fw=166.6, d=1.19) at 280 μL/100 mL reaction mix to obtain a 20 mM final concentration. The final concentrations in the reaction mix are ˜1M HCN, 2M NaCl, 50 mM sodium phosphate pH 7.0 to 7.2, 20 mM ECHB.

[0225] 200 μL of the reaction mixture was added to the lysed cells in each well. The plates were sealed using the Velocityl 1 PlateLoc™ heat sealer. The sealed plates were then shaken at room temperature for 120 minutes. After shaking, the plates were unsealed and 1 mL of 1 mM thymol (dissolved in ethyl acetate) was added to each well. The plates were resealed using the Velocityl 1 PlateLoc™ heat sealer, shaken vigorously, then allowed to sit for ˜1 minute to let the layers separate 150 μL aliquots of the upper layer were transferred to Costar round bottom shallow well polypropylene (PP) reaction plates (Cat# 3365) using a Hydra™ positive displacement liquid handler (Asp mode, AV 150, AH 2650, EH 37800, WH 3730, WV full, Wash 3). Samples were transferred from the deep well plate into the shallow well plates.

[0226] These plates were sealed using the Velocityl 1 PlateLoc™ heat sealer and stored at −20° C. until analysis by Gas Chromatography as described in Example 6B.

C. Medium Throughput-Gas Chromatography Assay for Inhibition in the Presence of Ethyl-4-Chloroacetoacetate (ECAA)

[0227] Hits were picked from desired wells (10 μL of culture) in the prescreen master well plates and transferred into the wells of 96 well NUNC plates (each well containing 200 ul LB+1% glucose, 30 μg/ml chloramphenicol (cam)) for overnight growth at 30° C., 250 rpm, 85% relative humidity. The positive controls were picked from the prescreen master well plates.

[0228] The next day, 10 μl aliquots of the overnight growth was subcultured into 96 deep well plates, each well containing 300 μl 2×YT, 100 mM NaH₂PO₄/Na₂HPO₄ pH 7, 1 mM MgSO₄, 30 μg/ml cam. These plates were incubated at 30° C., 250 rpm, 85% relative humidity, 2-4 hrs, until the cell density reached an OD 600 nm=0.6. The plates were then induced with 1 mM IPTG (e.g., 10 μl/well of a 34 mM IPTG stock solution or 30 μL/well of 10 mM IPTG stock) and incubated at 30° C. overnight, 250 rpm, 85% relative humidity.

[0229] The next day, the plates were centrifuged (4000 rpm, 10 min., 4° C.) to pellet the cells and the spent media was discarded. The plates can be frozen at −80° C. for one hour to aid in cell breakage.

[0230] The pelleted cells were lysed by adding 200 μL B-PER® lysing solution (Pierce, cat# 78243) with 1 ul/10 ml DNase (˜200 U/ul). The mixture of cells and lysing solution was vortexed to resuspend the cells and then incubated at 50° C. with shaking for two hours.

[0231] A reaction solution was made up in a fume hood, preferably using a plastic (PP) disposal container (volume determined by number of plates screened). To prepare the reaction solution having a 1M final concentration of NaCN, NaCN (fw=49.01, 4.9 g/100 mL) was added to the desired volume of 100 mM sodium phosphate pH 7 to give 1.47M concentration of NaCN. To each 68 mL of the NaCN solution was added 24 mL of 5M stock NaCl and 8 ml of concentrated HCl (˜10 M) to produce the desired volume of reaction mixture that was 1.2 M NaCl, 800 mM HCl, and 1M NaCN. The final pH of the reaction mixture is 7.0-7.2. To this solution was added ECHB (fw=166.6, d=1.19) to 100 mM final concentration (1400 μL/100 mL reaction mix) and ECAA (fw=164.6, d=1.21) to 5 mM final concentration (100 μL/100 mL reaction mix).

[0232] 200 μL of the reaction mixture was added to the lysed cells in each well. The plates were sealed using the Velocityl 1 PlateLoc™ heat sealer. The sealed plates were then shaken at room temperature for 60 minutes. After shaking, the plates were unsealed and 1 mL of 1 mM thymol (dissolved in ethyl acetate) was added to each well. The plates were resealed using the Velocityl 1 PlateLoc™ heat sealer, shaken vigorously, then allowed to sit for ˜1 minute to let the layers separate 150 μl aliquots of the upper layer were transferred to Costar round bottom shallow well polypropylene (PP) reaction plates (Cat# 3365) using a Hydra™ positive displacement liquid handler (Asp mode, AV 150, AH 2650, EH 37800, WH 3730, WV full, Wash 3). Samples were transferred from the deep well plate into the shallow well plates. These plates were sealed using the Velocityl 1 PlateLoc™ heat sealer and stored at −20° C. until analysis by Gas Chromatography as described in Example 6B.

### Example 6

### A. Detection of Ethyl (R)-4-cyano-3-hydroxybutyrate by Gas Chromotography

[0233] The ethyl (R)-4-cyano-3-hydroxybutyrate produced in Example 5A was analyzed using gas chromatography with flame ionization (FID) detection using an Agilent® HP-5™ column, 30 m long, 0.32 mm inner diameter, film 0.25 μm, using the following program: 1 minute at 100° C., 5° C./minute for 10 minutes; 25° C./minute for 2 minutes; then 2 minutes at 200° C. Inlet and outlet temperatures were both 300° C., and the flow rate was 2 ml/minute. Under these conditions, ethyl (R)-4-cyano-3-hydroxybutyrate elutes at 6.25 minutes and ethyl (S)-4-chloro-3-hydroxybutyrate elutes at 4.5 minutes. Chemical purity of the species was measured using the integrated peak areas from the gas chromoatography results.

[0234] Enantioselectivity of the halohydrin dehalogenase (HHDH) with respect to ethyl (R)-4-cyano-3-hydroxybutyrate was measured by gas chromatography and FID detection using a Restek gammaDex SA™ column (30 m long, 0.32 μm inner diameter) using the following program: 25 minutes at 165° C. and flow rate at 2 ml/min. Inlet and outlet temperatures were both at 230° C. Under these conditions ethyl (R)-4-cyano-3-hydroxybutyrate elutes at 19.6 minutes and ethyl (S)-4-cyano-3-hydroxybutyrate elutes at 19.2 minutes.

B. Detection of Remaining Ethyl (S)-4-chloro-3-hydroxybutyrate by Gas Chromatography

[0235] Halohydrin dehalogenases of the present invention that exhibited activity in the presence of cyanohydrin product in the prescreen method of Example 4B, were further characterized in the assay described in Example 5B. The remaining ethyl (S)-4-chloro-3-hydroxybutyrate in the reaction mixture from Example 5B was analyzed using gas chromatography with an Agilent® 19091J-413 HP-5™ 5% phenyl methyl siloxane column, 30.0 m long×320 μm inner diameter×0.25 μm nominal, and a flow rate of 2.6 ml/min. The following program was used: 1 minute at 100° C., 50° C./minute for 2 minutes, 2 minutes hold, with a 10 minute cycle time. The detector conditions were as follows: 300° C., 40 ml/min H₂, 450 ml/min air. Under these conditions, ethyl (S)-4-chloro-3-hydroxybutyrate elutes at 3.12 minutes, ethyl (R)-4-cyano-3-hydroxybutyrate elutes at 3.06 minutes, and thymol elutes at 3.21 minutes. Activity may be characterized by the quantity of ethyl (S)-4-chloro-3-hydroxybutyrate remaining normalized to the extraction efficiency, i.e., Area ECHB/Area Thymol. Thymol is used as an internal standard for extraction efficiency of the reaction components from water to ethyl acetate.

### Example 7

### Manufacture of Ethyl (R)-4-cyano-3-hydroxybutyrate from Ethyl (S)-4-chloro-3-hydroxybutyrate

[0236] To a 3-necked jacketed 3L flask equipped with a mechanical stirrer and connected to an automatic titrater by a pH electrode and a feeding tube for addition of base, was charged H₂O (1200 mL), NaCN (37.25 g) and NaH₂PO₄ (125 g) to bring the solution to pH 7. The water circulator was set to 40° C. After 10 minutes, halohydrin dehalogenase of SEQ ID NO: 32 as cell lysate (250 mL) was added. The reaction mixture was allowed to stir for 5 minutes. Using an addition funnel, ethyl (S)-4-chloro-3-hydroxybutyrate (45 g) was slowly added over 1 hour. The pH was maintained at 7 by the automatic titrater by the addition of 10 M NaOH (27 mL) over 17 hours. Subsequently, gas chromatography of a reaction sample showed complete conversion to product. Celite™ (16 g) was added to the flask, which was then connected to a diaphragm pump, whose exhaust is bubbled into 5M NaOH (200 mL), to remove HCN. The mixture was heated to 60° C. under 100 mm Hg pressure. After 1 hour, a submerged air bubbler was added to the solution to aid the removal of the HCN. After 3 hours, an HCN detector indicated less than 5 ppm HCN in the off-gas. The mixture was allowed to cool to room temperature, then filtered through a Celite™ pad. The filtrate was extracted with butyl acetate (3×800 mL) and the combined organic layers filtered through a pad of activated charcoal. The solvent was removed under vacuum by rotary evaporation to provide 28.5 g of ethyl (R)-4-cyano-3-hydroxybutyrate. The purity was 98% (w/w) by HPLC and the enantiomeric excess was >99% (by chiral GC, the S enantiomer was undetectable). As used herein, the term “enantiomeric excess” or “e.e.” refers to the absolute difference between the mole or weight fractions of major (F₍₊₎) and minor (F₍₋₎) enantiomers (i.e., |F₍₊₎−F₍₋₎|), where F₍₊₎+F₍₋₎=1. Percent e.e. is 100×|F₍₊₎−F₍₋₎|. Enantiomeric composition can be readily characterized by using the gas chromatography method described in Example 6, above, and using methods that are known in the art.

### Examples 8-12

### Conversion of Ethyl (R)-4-chloro-3-hydroxybutyrate to Ethyl (S)-4-cyano-3-hydroxybutyrate

[0237] For each of Examples 8-12, to a 170 mL vessel connected to an automatic titrater by a pH electrode and a feeding tube for addition of base was charged NaCN (1.5 g, 31 mmol) and water (50 mL). The vessel was sealed and the pH was adjusted to 7 by the addition of conc. H₂SO₄ (0.9 mL). The reaction mixture was heated to 40° C. and treated with a solution of halohydrin dehalogenase (0.4 g in 10 mL water). The halohydrin dehalogenases used for these Examples had the polypeptide sequences given for the following SEQ ID NOs.:

| | |
|---|---|
| Example 8 | SEQ ID No: 32 |
| Example 9 | SEQ ID No: 90 |
| Example 10 | SEQ ID No: 94 |
| Example 11 | SEQ ID No: 96 |
| Example 12 | SEQ ID No: 98 |

Then, ethyl (S)-4-chloro-3-hydroxybutyrate (5.00 g, 30.1 mmol) was added via syringe. The automatic titrater maintained the pH at 7 by the addition of 4M NaCN. The progress of the reactions was monitored by recording the cumulative volume of the NaCN solution added vs. time.

[0238] FIG. 2 shows the percent conversion of ethyl (S)-4-chloro-3-hydroxy-butyrate (calculated from the cumulative equivalents of NaCN added) vs. time for each of these Examples. Example 8 used a halohydrin dehalogenase having the amino acid sequence SEQ ID NO. 32, which is the amino acid sequence of the native halohydrin dehalogenase from Agrobacterium radiobacter AD1 (hheC), expressed from novel nucleic acid corresponding to SEQ ID NO. 31. Comparison of the percent conversion vs. time for Examples 9 through 12 to that of Example 8 shows that novel halohydrin dehalogenases of the present invention have greater activity than the native halohydrin dehalogenase from Agrobacterium radiobacter AD 1 (hheC).

[0239] All publications, patents, patent applications, and other documents cited in this application are incorporated by reference in their entirety for all purposes to the same extent as if each individual publication, patent, patent application, or other document were individually indicated to be incorporated by reference for all purposes.

[0240] While preferred embodiments of the invention have been illustrated and described, it will be readily appreciated that various changes can be made therein without departing from the spirit and scope of the invention.

In the Specification:

[0241] Please delete the paper copy of the originally filed SEQUENCE LISTING, having SEQ ID NOs: 1-1143 and pages 1-1540, and substitute therefor the Substitute SEQUENCE LISTING, as cofiled herewith, having SEQ ID NOs: 1-1144 and pages 1-1293.

1. An HHDH polypeptide is resistant to inhibition by ECAA, the HHDH polypeptide, when aligned with SEQ ID NO: 2, having one or more of the residue changes selected from the group consisting of A4V, F82Y, T134V, F136W, F136V, L142R, L178V, W238L, A240T, W249Y and M252I.

2. An isolated or recombinant polypeptide having at least 1.4 fold greater HHDH activity as compared to wild-type HHDH having the amino acid sequence of SEQ ID NO: 2, and
wherein the polypeptide is encoded by a nucleic acid that hybridizes under stringent conditions over substantially the entire length of a nucleic acid having a sequence selected from the group consisting of SEQ ID NO: 3, 9, 11, 13, 15, 17, 33, 37, 43, 47, 49, 51, 65, 67, 79, 83, 109, 113, 115, 117, 153, 157, 161, 163, 165, 169, 179, 191, 199, 261, 263, 265, 269, 421, 439, 441, 447, 469, 475, 519, 701, 725, 729, 731, 733, 735, 737, 743, 745, 747, 749 and complementary sequences thereof.

3. An isolated or recombinant polypeptide having at least 1.4 fold greater HHDH activity as compared to wild-type HHDH having the amino acid sequence of SEQ ID NO: 2,
wherein the polypeptide has an amino acid sequence selected from the group consisting of SEQ ID NO: 4, 10, 12, 14, 16, 18, 34, 38, 44, 48, 50, 52, 66, 68, 80, 84, 110, 114, 116, 118, 154, 158, 162, 164, 166, 170, 180, 191, 200, 262, 264, 266, 270, 422, 440, 442, 448, 470, 476, 520, 702, 726, 730, 732, 734, 736, 738, 744, 746, 748 and 750.

4. An isolated or recombinant polypeptide having HHDH activity, wherein the polypeptide comprises an amino acid sequence that is at least 90% identical to SEQ ID NO: 730.

5. The isolated or recombinant polypeptide of claim 4, wherein the polypeptide comprises an amino acid sequence corresponding to SEQ ID NO: 730 and one or more residue substitutions selected from the group consisting of M54I, D99G, T100M, K121R, P135S, S146A, W238T, and W251E.

6. An isolated or recombinant polypeptide having HHDH activity, wherein the polypeptide comprises an amino acid sequence that is at least 86% identical to SEQ ID NO: 750.

7. An isolated or recombinant polypeptide having HHDH activity, wherein the polypeptide comprises an amino acid sequence selected from the group consisting of:
(a) an amino acid sequence that is at least 80% identical to SEQ ID NO: 750 and has one or more amino acid residues selected from the group consisting of A at position 27, Q at position 46, I at position 54, V at position 60, V at position 65, T at position 67, S at position 87, R at position 91, A at position 95, E at position 96, G at position 99, M or A or Q at position 100, R at position 117, S at position 118, E at position 121, S at position 135, S at position 144, A at position 146, T at position 152, N at position 153, M at position 178, N at position 179, N at position 182, V at position 190, A at position 199, Y at position 201, Y at position 205, L at position 236, T at position 238, and E or A at position 251; and
(b) an amino acid sequence encoded by a nucleic acid that hybridizes under stringent conditions over substantially the entire length of a nucleic acid corresponding to SEQ ID NO: 749, and wherein the encoded polypeptide, when optimally aligned with SEQ ID NO: 750, comprises an amino acid sequence having at least one amino acid residue selected from the group consisting of A at position 27, Q at position 46, I at position 54, V at position 60, V at position 65, T at position 67, S at position 87, R at position 91, A at position 95, E at position 96, G at position 99, M or A or Q at position 100, R at position 117, S at position 118, E at position 121, S at position 135, S at position 144, A at position 146, T at position 152, N at position 153, M at position 178, N at position 179, N at position 182, V at position 190, A at position 199, Y at position 201, Y at position 205, L at position 236, T at position 238, and E or A at position 251.

8. The isolated or recombinant polypeptide of claim 7, wherein the polypeptide comprises one or more residues selected from the group consisting of A at position 27, Q at position 46, I at position 54, V at position 60, V at position 65, S at position 87, R at position 91, A at position 95, E at position 96, G at position 99, M or A or Q at position 100, R at position 117, S at position 118, E at position 121, S at position 135, S at position 144, A at position 146, T at position 152, N at position 153, M at position 178, N at position 179, N at position 182, V at position 190, A at position 199, Y at position 201, Y at position 205, L at position 236, T at position 238, and E or A at position 251.

9. The isolated or recombinant polypeptide of claim 7, wherein the polypeptide comprises two or more residues selected from the group consisting of A at position 27, Q at position 46, I at position 54, V at position 60, V at position 65, S at position 87, R at position 91, A at position 95, E at position 96, G at position 99, M or A or Q at position 100, R at position 117, S at position 118, E at position 121, S at position 135, S at position 144, A at position 146, T at position 152, N at position 153, M at position 178, N at position 179, N at position 182, V at position 190, A at position 199, Y at position 201, Y at position 205, L at position 236, T at position 238, and E or A at position 251.

10. The isolated or recombinant polypeptide of claim 7, wherein the polypeptide comprises two or more residues selected from the group consisting of A at position 27, Q at position 38, Q at position 46, I at position 54, V at position 60, T at position 67, S at position 87, R at position 91, A at position 95, E at position 96, G at position 99, M or A or Q at position 100, R at position 117, S at position 118, R at position 121, S at position 135, S at position 144, A at position 146, N at position 153, M at position 178, N at position 179, N at position 182, V at position 190, A at position 199, Y at position 201, L at position 236, T at position 238, and E or A at position 251.

11. The isolated or recombinant polypeptide of claim 7, wherein the polypeptide comprises three or more residues selected from the group consisting of A at position 27, Q at position 38, Q at position 46, I at position 54, V at position 60, T at position 67, S at position 87, R at position 91, A at position 95, E at position 96, G at position 99, M or A or Q at position 100, R at position 117, S at position 118, R at position 121, S at position 135, S at position 144, A at position 146, N at position 153, M at position 178, N at position 179, N at position 182, V at position 190, A at position 199, Y at position 201, L at position 236, T at position 238, and E or A at position 251.

12. The isolated or recombinant polypeptide of claim 7, wherein the polypeptide comprises R at position 121, S at position 135, and A at position 146.

13. The isolated or recombinant polypeptide of claim 7, wherein the polypeptide has one or more amino acid residues selected from the group consisting of V at position 60, R at position 91, E at position 96, A at position 100, R at position 117, S at position 118, N at position 153, M at position 178, N at position 179, N at position 182, V at position 190, and A at position 251.

14. The isolated or recombinant polypeptide of claim 7, wherein the polypeptide has one or more amino acid residues selected from the group consisting of Q at position 100, S at position 87, A at position 27, A at position 199, S at position 144, Q at position 46, A at position 95, Y at position 201, and L at position 236.

15. An isolated or recombinant polypeptide having HHDH activity, wherein the polypeptide comprises an amino acid sequence that is selected from the group consisting of:
(a) an amino acid sequence that is at least 80% identical to SEQ ID NO: 730 and has one or more amino acid residues selected from the group consisting of Q at position 38, I at position 54, T at position 67, G at position 99, M at position 100, R at position 121, S at position 135, A at position 146, T at position 238, and E at position 251;
(b) an amino acid sequence encoded by a nucleic acid that hybridizes under stringent conditions over substantially the entire length of a nucleic acid corresponding to SEQ ID NO: 729, and wherein the encoded polypeptide, when optimally aligned with SEQ ID NO: 730, comprises an amino acid sequence having at least one amino acid residue selected from the group consisting of Q at position 38, I at position 54, T at position 67, G at position 99, M at position 100, R at position 121, S at position 135, A at position 146, T at position 238, and E at position 251.

16. The isolated or recombinant polypeptide of claim 15, wherein the polypeptide has one or more amino acid residues selected from the group consisting of I at position 54, G at position 99, M at position 100, R at position 121, S at position 135, A at position 146, T at position 238, and E at position 251.

17. An isolated or recombinant polypeptide having HHDH activity, wherein the polypeptide is at least 97% identical to SEQ ID NO: 750.

18. The isolated or recombinant polypeptide of claim 17, wherein the amino acid sequence of the polypeptide comprises one or more amino acid residue selected from the group consisting of A at position 27, Q at position 38, Q at position 46, I at position 54, V at position 60, T at position 67, S at position 87, R at position 91, A at position 95, E at position 96, G at position 99, M or A or Q at position 100, R at position 117, S at position 118, R at position 121, S at position 135, S at position 144, A at position 146, N at position 153, M at position 178, N at position 179, N at position 182, V at position 190, A at position 199, Y at position 201, L at position 236, T at position 238, and E or A at position 251.

19. An isolated polynucleotide encoding a polypeptide having HHDH activity, wherein the polypeptide comprises an amino acid sequence that is at least 90% identical to SEQ ID NO: 730.

20. The isolated polynucleotide of claim 19, wherein the polypeptide comprises an amino acid sequence corresponding to SEQ ID NO: 730 and one or more residue substitutions selected from the group consisting of M54I, D99G, T100M, K121R, P135S, S146A, W238T, and W251E.

21. An isolated polynucleotide encoding a polypeptide having HHDH activity, wherein the polypeptide comprises an amino acid sequence that is at least 86% identical to SEQ ID NO: 750.

22. An isolated polynucleotide encoding a polypeptide having HHDH activity, wherein the polypeptide comprises an amino acid sequence selected from the group consisting of:
(a) an amino acid sequence that is at least 80% identical to SEQ ID NO: 750 and has one or more amino acid residues selected from the group consisting of A at position 27, Q at position 46, I at position 54, V at position 60, V at position 65, T at position 67, S at position 87, R at position 91, A at position 95, E at position 96, G at position 99, M or A or Q at position 100, R at position 117, S at position 118, E at position 121, S at position 135, S at position 144, A at position 146, T at position 152, N at position 153, M at position 178, N at position 179, N at position 182, V at position 190, A at position 199, Y at position 201, Y at position 205, L at position 236, T at position 238, and E or A at position 251; and
(b) an amino acid sequence encoded by a nucleic acid that hybridizes under stringent conditions over substantially the entire length of a nucleic acid corresponding to SEQ ID NO: 749, and wherein the encoded polypeptide, when optimally aligned with SEQ ID NO: 750, comprises an amino acid sequence having at least one amino acid residue selected from the group consisting of A at position 27, Q at position 38, Q at position 46, I at position 54, V at position 60, T at position 67, S at position 87, R at position 91, A at position 95, E at position 96, G at position 99, M or A or Q at position 100, R at position 117, S at position 118, R at position 121, S at position 135, S at position 144, A at position 146, N at position 153, M at position 178, N at position 179, N at position 182, V at position 190, A at position 199, Y at position 201, L at position 236, T at position 238, and E or A at position 251.

23. The isolated polynucleotide of claim 22, wherein the polypeptide comprises one or more residues selected from the group consisting of A at position 27, Q at position 46, I at position 54, V at position 60, V at position 65, S at position 87, R at position 91, A at position 95, E at position 96, G at position 99, M or A or Q at position 100, R at position 117, S at position 118, E at position 121, S at position 135, S at position 144, A at position 146, T at position 152, N at position 153, M at position 178, N at position 179, N at position 182, V at position 190, A at position 199, Y at position 201, Y at position 205, L at position 236, T at position 238, and E or A at position 251.

24. The isolated polynucleotide of claim 22, wherein the polypeptide comprises two or more residues selected from the group consisting of A at position 27, Q at position 46, I at position 54, V at position 60, V at position 65, S at position 87, R at position 91, A at position 95, E at position 96, G at position 99, M or A or Q at position 100, R at position 117, S at position 118, E at position 121, S at position 135, S at position 144, A at position 146, T at position 152, N at position 153, M at position 178, N at position 179, N at position 182, V at position 190, A at position 199, Y at position 201, Y at position 205, L at position 236, T at position 238, and E or A at position 251.

25. The isolated polynucleotide of claim 22, wherein the polypeptide comprises two or more residues selected from the group consisting of A at position 27, Q at position 38, Q at position 46, I at position 54, V at position 60, T at position 67, S at position 87, R at position 91, A at position 95, E at position 96, G at position 99, M or A or Q at position 100, R at position 117, S at position 118, R at position 121, S at position 135, S at position 144, A at position 146, N at position 153, M at position 178, N at position 179, N at position 182, V at position 190, A at position 199, Y at position 201, L at position 236, T at position 238, and E or A at position 251.

26. The isolated polynucleotide of claim 22, wherein the polypeptide comprises three or more residues selected from the group consisting of A at position 27, Q at position 46, I at position 54, V at position 60, V at position 65, S at position 87, R at position 91, A at position 95, E at position 96, G at position 99, M or A or Q at position 100, R at position 117, S at position 118, E at position 121, S at position 135, S at position 144, A at position 146, Tat position 152, N at position 153, M at position 178, N at position 179, N at position 182, V at position 190, A at position 199, Y at position 201, Y at position 205, L at position 236, Tat position 238, and E or A at position 251.

27. The isolated polynucleotide of claim 22, wherein the polypeptide comprises R at position 121, S at position 135, and A at position 146.

28. The isolated polynucleotide of claim 22, wherein the polypeptide has one or more amino acid residues selected from the group consisting of V at position 60, R at position 91, E at position 96, A at position 100, R at position 117, S at position 118, N at position 153, M at position 178, N at position 179, N at position 182, V at position 190, and A at position 251.

29. The isolated polynucleotide of claim 22, wherein the polypeptide has one or more amino acid residues selected from the group consisting of Q at position 100, S at position 87, A at position 27, A at position 199, S at position 144, Q at position 46, A at position 95, Y at position 201, and L at position 236.

30. An isolated polynucleotide encoding a polypeptide having HHDH activity, wherein the polypeptide comprises an amino acid sequence that is selected from the group consisting of:
(a) an amino acid sequence that is at least 80% identical to SEQ ID NO: 730 and has one or more amino acid residues selected from the group consisting of Q at position 38, I at position 54, T at position 67, G at position 99, M at position 100, R at position 121, S at position 135, A at position 146, T at position 238, and E at position 251;
(b) an amino acid sequence encoded by a nucleic acid that hybridizes under stringent conditions over substantially the entire length of a nucleic acid corresponding to SEQ ID NO: 729, and wherein the encoded polypeptide, when optimally aligned with SEQ ID NO: 730, comprises an amino acid sequence having at least one amino acid residue selected from the group consisting of Q at position 38, I at position 54, T at position 67, G at position 99, M at position 100, R at position 121, S at position 135, A at position 146, T at position 238, and E at position 251.

31. The isolated polynucleotide of claim 30, wherein the polypeptide has one or more amino acid residues selected from the group consisting of I at position 54, G at position 99, M at position 100, R at position 121, S at position 135, A at position 146, T at position 238, and E at position 251.

32. An isolated polynucleotide encoding a polypeptide having HHDH activity, wherein the polypeptide is at least 97% identical to SEQ ID NO: 750.

33. The isolated polynucleotide of claim 32, wherein the amino acid sequence of the polypeptide comprises one or more amino acid residue selected from the group consisting of A at position 27, Q at position 38, Q at position 46, I at position 54, V at position 60, T at position 67, S at position 87, R at position 91, A at position 95, E at position 96, G at position 99, M or A or Q at position 100, R at position 117, S at position 118, R at position 121, S at position 135, S at position 144, A at position 146, N at position 153, M at position 178, N at position 179, N at position 182, V at position 190, A at position 199, Y at position 201, L at position 236, T at position 238, and E or A at position 251.

34. A host cell comprising the polynucleotide of any of claims 19-33.

35. A method of making a polypeptide having enhanced HHDH enzymatic activity, comprising
(a) transforming a host cell with a polynucleotide of any one of claims 19-33;
(b) culturing the transformed host cell in a culture medium under conditions that cause said polynucleotide to express the encoded HHDH polypeptide; and
(c) isolating the expressed HHDH polypeptide from the culture medium or from the transformed and cultured host cells.

36. The isolated or recombinant polypeptide of claim 7, wherein the one or more amino acid residues are selected from the group consisting of V at position 65, G at position 99, M at position 100, E at position 121, T at position 152, Y at position 205, and T at position 238.

37. The isolated polynucleotide of claim 22, wherein the one or more amino acid residues are selected from the group consisting of V at position 65, G at position 99, M at position 100, E at position 121, T at position 152, Y at position 205, and T at position 238.

The application's sequence listing, which the Patent Office published only in electronic form, follows.

SEQUENCE LISTING (1143 sequences)

SEQ ID NO: 1 - DNA, 765 bp, Artificial Sequence
  HHDH variant
  CDS (1)..(765)
atgagcaccgctatcgtcaccaacgtcaaacattttggtggtatgggtagcgctctgaggctgagcgaagctggtcataccgtcgcttgccatgatgaaagctttaaacagaaagatgaactggaagcttttgctgaaacctacccacagctgaaaccaatgagcgaacaggaaccagctgaactgatcgaagctgtcaccagcgcttacggtcaggtcgatgtcctggtcagcaacgatatctttgctccagaatttcagccaatcgataaatacgctgtcgaagattacaggggtgctgtcgaagctctgcagatcaggccatttgctctagtgaatgctgtggcttcgcaaatgaagaagcgaaagtcggggcacatcatcttcatcacttcggctactccgttcgggccgtggaaggagctatcgacttacacttcggctcgagctggggcttgtactctagctaatgctctatcgaaggagctaggggagtacaatatcccggtgttcgctatcgggccgaattacctacactcggaggattcgccgtacttctacccgactgagccgtggaagactaatccggagcacgtggctcacgtgaagaaggtgactgctctacaacgactagggactcaaaaagagttgggggaattggtggcatttttggcatctggctcttgtgattatttgactggccaggtgttttggttggcaggcggctttcccatgatagaacgttggcccggcatgcccgaataa

SEQ ID NO: 2 - protein, 254 aa, Artificial Sequence
  HHDH variant
MSTAIVTNVKHFGGMGSALRLSEAGHTVACHDESFKQKDELEAFAETYPQLKPMSEQEPAELIEAVTSAYGQVDVLVSNDIFAPEFQPIDKYAVEDYRGAVEALQIRPFALVNAVASQMKKRKSGHIIFITSATPFGPWKELSTYTSARAGACTLANALSKELGEYNIPVFAIGPNYLHSEDSPYFYPTEPWKTNPEHVAHVKKVTALQRLGTQKELGELVAFLASGSCDYLTGQVFWLAGGFPMIERWPGMPE

SEQ ID NO: 3 - DNA, 765 bp, Artificial Sequence
  HHDH variant
  CDS (1)..(765)
atgagcaccgctatcgtcaccaacgtcaaacattttggtggtatgggtagcgctctaaggctgagcgaagctggtcataccgtcgcttgccatgatgaaagctttaaccagaaagatgaactggaagctttgcctgaaacctacccacagctgaaaccaatgagggaacaggaaccagctgaactgatcgaagctgtcaccagcgcttacggtcaggtcgatgtcctggtcagcaacgatatctttgctccagaatttcagccaatcgataaatacgctgtcgaagattacaggggtgctgtggaagctctgcagatcaggccatttgctctagtgaatgctgtggcttcgcaaatgaagaagcgaaagtcggggcacatcatcttcatcacttcggctactccgttcgggccgtggaaggagctatcgacttacacttcggctcgagctggggcttgtactctagctaatgctctatcgaaggagctaggagagtacaatatcccggtgttcgctatcgggccgaattacctacactcggaggattcgccgtacttctacccgactgagccgtggaagactaatccggagcacgtggctcacgtgaagaaggtgactgctctacaacgactagggactcaaaaagagttgggggaattggtggcatttttggcatctggctcttgtgattatttgactggccaggtgttttggttggcaggcggctttcctatgatagaacgttggcccggcatgcccgaataa

SEQ ID NO: 4 - protein, 254 aa, Artificial Sequence
  HHDH variant
MSTAIVTNVKHFGGMGSALRLSEAGHTVACHDESFNQKDELEALPETYPQLKPMREQEPAELIEAVTSAYGQVDVLVSNDIFAPEFQPIDKYAVEDYRGAVEALQIRPFALVNAVASQMKKRKSGHIIFITSATPFGPWKELSTYTSARAGACTLANALSKELGEYNIPVFAIGPNYLHSEDSPYFYPTEPWKTNPEHVAHVKKVTALQRLGTQKELGELVAFLASGSCDYLTGQVFWLAGGFPMIERWPGMPE

SEQ ID NO: 5 - DNA, 765 bp, Artificial Sequence
  HHDH variant
  CDS (1)..(765)
atgagcaccgctatcgtcaccaacgtcaaacattttggtggtatgggtagcgctctgaggctgagcgaaactggtcataccgtcgcttgccatgatgaaagctttaaacagaaagatgaactggaagcttttgctgaaacctacccacagctgaaaccaatgagcgaacaggaaccagctgaactgatcgaagctgtcaccagcgcttacggtcaggtcgatgtcctggtcagcaacgatatctttgctccagaatttcagccaatcgataaatacgctgtcgaagattacaggggtgctgtcgaagctctgcagatcaggccatttgctctagtgaatgctgtggcttcgcaaatgaagaagcgaaagtcggggcacatcatcttcatcacttcggctactccgttcgggccgtggaaggagctatcgacttacacttcggctcgagctggggcttgtactctagctaatgctctatcgaaggagctaggagagtacaatatcccggtgttcgctatcgggccgaattacctacactcggaggattcgccgtacttctacccgactgagccgtggaagactaatccggagcacgtggctcacgtgaagaaggtgactgctctacaacgactagggactcaaaaagagttgggggaattggtggcatttttggcatctggctcttgtgattatttgactggccaggtgttttggttggcaggcggctttcccatgatagaacgttggcccggcatgcccgaataa

SEQ ID NO: 6 - protein, 254 aa, Artificial Sequence
  HHDH variant
MSTAIVTNVKHFGGMGSALRLSETGHTVACHDESFKQKDELEAFAETYPQLKPMSEQEPAELIEAVTSAYGQVDVLVSNDIFAPEFQPIDKYAVEDYRGAVEALQIRPFALVNAVASQMKKRKSGHIIFITSATPFGPWKELSTYTSARAGACTLANALSKELGEYNIPVFAIGPNYLHSEDSPYFYPTEPWKTNPEHVAHVKKVTALQRLGTQKELGELVAFLASGSCDYLTGQVFWLAGGFPMIERWPGMPE

SEQ ID NO: 7 - DNA, 765 bp, Artificial Sequence
  HHDH variant
  CDS (1)..(765)
atgagcaccgctatcgtcaccaacgtcaaacattttggtggtatgggtagcgctctgagcctgagcgaagctggtcataccgtcacttgccatgatgaaagctttaaacagaaagatgaactggaagcttttgctgaaacctacccacagctgaaaccaatgagcgaacaggaaccagctgaactgatcgaagctgtcaccagcgcttacggtcaggtcgatgtcctggtcagcaacgatatctttgctccagaatttcagccaatcgataaatacgctgtcgaagattacaggggtgctgtcgaagctctgcagatcaggccatttgctctagtgaatgctgtggcttcgcaaatgaagaagcgaaagtcggggcacatcatcttcatcacttcggctactccgttcgggccgtggaaggagctatcgacttacacttcggctcgagctggggcttgtactctagctaatgctctatcgaaggagctaggagagtacaatatcccggtgttcgctatcgggccgaattacctacactcggaggattcgccgtacttctacccgactgagccgtggaagactaatccggagcacgtggctcacgtgaagaaggtgactgctctacaacgactagggactcaaaaagagttgggggaattggtggcatttttggcatctggctcttgtgattatttgactggccaggtgttttggttggcaggcggctttcccatgatagaacgttggcccggcatgcccgaataa

SEQ ID NO: 8 - protein, 254 aa, Artificial Sequence
  HHDH variant
MSTAIVTNVKHFGGMGSALSLSEAGHTVTCHDESFKQKDELEAFAETYPQLKPMSEQEPAELIEAVTSAYGQVDVLVSNDIFAPEFQPIDKYAVEDYRGAVEALQIRPFALVNAVASQMKKRKSGHIIFITSATPFGPWKELSTYTSARAGACTLANALSKELGEYNIPVFAIGPNYLHSEDSPYFYPTEPWKTNPEHVAHVKKVTALQRLGTQKELGELVAFLASGSCDYLTGQVFWLAGGFPMIERWPGMPE

SEQ ID NO: 9 - DNA, 765 bp, Artificial Sequence
  HHDH variant
  CDS (1)..(765)
atgaccgccgctatcgtcaccaacgtcaaacattttggtggtatgggtagcgctctgaggctgagcgaagctggtcataccgtcacttgccatgatgaaaggttgaaacagaaagatgaactggaagcttttgctgaaacctacccacagctgaatccaatgagcgaacaggagccagctgaactgatcgaagctgtcaccagcgcttacggtcaggtcgatgtcctggtcagcaacgatatctttgctccagaatttcagccaatcgataaatacgctgtcgaagattacaggggtgctgtcgaagctctgcagatcaggccatttgctctagtgaatgctgtggcttcgcaaatgaagaagcgaaagtcggggcacatcatcttcatcacttcggctactccgttcgggccgtggaaggagctatcgacttacacttcggctcgagctggggcttgtactctagctaatgctctatcgaaggagctaggagagtacaatatcccggtgttcgctatcgggccgaattacctacactcggaggattcgccgtacttctacccgactgagccgtggaagactaatccggagcacgtggctcacgtgaagaaggtgactgctctacaacgactagggactcaaaaagagttgggggaattggtggcatttttggcatctggctcttgtgattatttgactggccaggtgttttggttggcaggcggctttcccatgatagagcgttggcccggcatgcccgaataa

SEQ ID NO: 10 - protein, 254 aa, Artificial Sequence
  HHDH variant
MTAAIVTNVKHFGGMGSALRLSEAGHTVTCHDERLKQKDELEAFAETYPQLNPMSEQEPAELIEAVTSAYGQVDVLVSNDIFAPEFQPIDKYAVEDYRGAVEALQIRPFALVNAVASQMKKRKSGHIIFITSATPFGPWKELSTYTSARAGACTLANALSKELGEYNIPVFAIGPNYLHSEDSPYFYPTEPWKTNPEHVAHVKKVTALQRLGTQKELGELVAFLASGSCDYLTGQVFWLAGGFPMIERWPGMPE

SEQ ID NO: 11 - DNA, 765 bp, Artificial Sequence
  HHDH variant
  CDS (1)..(765)
atgagccccgctatcgtcaccaacatcaaacattttagcggtatgtgtcgcgctctgaggctgagcgaagctggtcataccgtcgcttgccatgatgaaagctttaaacagaaagatgaactggaagcttttgctgaaacctacccacagctgaaaccaatgagcgaacaggaaccagctgaactgatcgaagctgtcaccagcgcttacggtcaggtcgatgtcctggtcagcaacgatatctttgctccagaatttcagccaatcgataaatacgctgtcgaagattacaggggtgctgtcgaagctctgcagatcaggccatttgctctagtgaatgctgtggcttcgcaaatgaagaagcgaaagtcggggcacatcatcttcatcacttcggctactccgttcgggccgtggaaggagctatcgacttacacttcggctcgagctggggcttgtactctagctaatgctctatcgaaggagctaggagagtacaatatcccggtgttcgctatcgggccgaattacctacactcggaggattcgccgtacttctacccgactgagccgtggaagactaatccggagcacgtggctcacgtgaagaaggtgactgctctacaacgactagggactcaaaaagagttgggggaattggtggcatttttggcatctggctcttgtgattatttgactggccaggtgttttggttggcaggcggctttcccatgatagaacgttggcccggcatgcccgaataa

SEQ ID NO: 12 - protein, 254 aa, Artificial Sequence
  HHDH variant
MSPAIVTNIKHFSGMCRALRLSEAGHTVACHDESFKQKDELEAFAETYPQLKPMSEQEPAELIEAVTSAYGQVDVLVSNDIFAPEFQPIDKYAVEDYRGAVEALQIRPFALVNAVASQMKKRKSGHIIFITSATPFGPWKELSTYTSARAGACTLANALSKELGEYNIPVFAIGPNYLHSEDSPYFYPTEPWKTNPEHVAHVKKVTALQRLGTQKELGELVAFLASGSCDYLTGQVFWLAGGFPMIERWPGMPE

SEQ ID NO: 13 - DNA, 765 bp, Artificial Sequence
  HHDH variant
  CDS (1)..(765)
atgagcaccgctatcgacaccaacgtcaaacattttggtagtaagggtaccgctctgaggctgagcgaagctggtcataccgtcgcttgccatgatgaaagctttaaacagaaagatgatctggaagcttttgctgaaacctacccacagctgaaaccaatgagcgaacaggaaccagctgaactgatcgaagctgtcaccagcgcttacggtcaggtcgatgtcctggtcagcaacgatatctttgctccagaatttcagccaatcgataaatacgctgtcgaagattacagaggtgctgtcgaagctctgcagatcaggccatttgctctagtgaatgctgtggcttcgcaaatgaagaagcgaaagtcggggcacatcatcttcatcacttcgagtactccgttcgggccgtggaaggagctatcgacttacacttcggctcgagctggggcttgtactctagctaatgctctatcgaaggagctaggagagtacaatatcccggtgttcgctatcgggccgaattacctacactcggaggattcgccgtacttctacccgactgagccttggaagactaatccggagcacgtggctcacgtgaagaaggtgactgctctacaacggctagggactcaaaaagagttgggggaattggtggcatttttggcatctggctcttgtgattatttgactggccaggtgttttggttggcaggcggctttcccatgatagaacgttggcccggcatgcccgaataa

SEQ ID NO: 14 - protein, 254 aa, Artificial Sequence
  HHDH variant
MSTAIDTNVKHFGSKGTALRLSEAGHTVACHDESFKQKDDLEAFAETYPQLKPMSEQEPAELIEAVTSAYGQVDVLVSNDIFAPEFQPIDKYAVEDYRGAVEALQIRPFALVNAVASQMKKRKSGHIIFITSSTPFGPWKELSTYTSARAGACTLANALSKELGEYNIPVFAIGPNYLHSEDSPYFYPTEPWKTNPEHVAHVKKVTALQRLGTQKELGELVAFLASGSCDYLTGQVFWLAGGFPMIERWPGMPE

SEQ ID NO: 15 - DNA, 765 bp, Artificial Sequence
  HHDH variant
  CDS (1)..(765)
atgagcaccgctatcgtcaccaacgtcaaacattttggtggtatgggtagcgctctgaggctgagcgaagctggtcataccgtcgcttgccatgatgaaagctttaaacagaaagatgaactggaagcttttgctgaaacctacccacagctgaaaccaatgagcgaacaggaaccagctgaactgatcgaagctgtcaccagcgcttacggtcaggtcgatgtcctggtcagcaacgatatctttgctccagaatttcagccaatcgataaatacgctgtcgaagattacaggggtgctgtcgaagctctgcagatcaggccatttgctctagtgaatgctgtggcttcgcaaatgaagaagcgaaagtcggggcacatcatcttcatcacttcggctactccgctcgggccgtggaaggagctatcgacttacacttcggctcgagctggggcttgtactctagctaatgctctatcgaaggagctaggagagtacaatatcccggtgttcgctatcgggccgaattacctacactcggaggattcgccgtacttctacccgactgagccgtggaagactaatccggagcacgtggctcacgtgaagaaggtgactgctctacaacgactagggactcaaaaagagttgggggaattggtggcatttttggcatctggctcttgtgattatttgactggccaggtgttttggttggcaggcggctttcccatgatagaacgttggcccggcatgcccgaataa

SEQ ID NO: 16 - protein, 254 aa, Artificial Sequence
  HHDH variant
MSTAIVTNVKHFGGMGSALRLSEAGHTVACHDESFKQKDELEAFAETYPQLKPMSEQEPAELIEAVTSAYGQVDVLVSNDIFAPEFQPIDKYAVEDYRGAVEALQIRPFALVNAVASQMKKRKSGHIIFITSATPLGPWKELSTYTSARAGACTLANALSKELGEYNIPVFAIGPNYLHSEDSPYFYPTEPWKTNPEHVAHVKKVTALQRLGTQKELGELVAFLASGSCDYLTGQVFWLAGGFPMIERWPGMPE

SEQ ID NO: 17 - DNA, 765 bp, Artificial Sequence
  HHDH variant
  CDS (1)..(756)
atgagcaccgctatcgtcaccaacgtcaaacattttggtggtatgggtagcgctctgaggctgagcgaagctggtcataccgtcgcttgccatgatgaaagctttaaacagaaagatgaactggaagcttttgctgaaacctacccacagctgaaaccaatgagcgaacaggaaccagctgaactgatcgaagctgtcaccagcgcttacggtcaggtcgatgtcctggtcagcaacgatatctttgctccagaatttcagccaatcgataaatacgctgtcgaagattacaggggtgctgtcgaagctctgcagatcaggccatttgctctagtgaatgctgtggcttcgcaaatgaagaagcgaaagtcggggcacatcatcttcatcacttcggctactccgttcgggccgtggaaggagctatcgacttacacttcggctcgagctggggcttgtactctagctaatgctctatcgaaggagctaggagagtacaatatcccggtgttcgctatcgggccgaattacctacactcggaggattcgccgtacttctacccgactgagccgtggaagactaatccggagcacgtggctcacgtgaagaaggtgactgctctacaacgactagggactcaaaaagagttgggggaattggtggcatttttggcatctggctcttgtgattatttgactggccaggggttttttttggcaggcggctttcccatgatagaacgttggcccggcatgcccgtataa

SEQ ID NO: 18 - protein, 252 aa, Artificial Sequence
  HHDH variant
MSTAIVTNVKHFGGMGSALRLSEAGHTVACHDESFKQKDELEAFAETYPQLKPMSEQEPAELIEAVTSAYGQVDVLVSNDIFAPEFQPIDKYAVEDYRGAVEALQIRPFALVNAVASQMKKRKSGHIIFITSATPFGPWKELSTYTSARAGACTLANALSKELGEYNIPVFAIGPNYLHSEDSPYFYPTEPWKTNPEHVAHVKKVTALQRLGTQKELGELVAFLASGSCDYLTGQGFFLAGGFPMIERWPGM

SEQ ID NO: 19 - DNA, 765 bp, Artificial Sequence
  HHDH variant
  CDS (1)..(765)
atgagccccgctatcgtcaccaacgtcaaacattttggtggtatgggtagcgctctgaggctgagcgaagctggtcataccgtcgcttgccatgatgaaagctttaaacagaaagatgaactggaagcttttgctgaaacctacccacagctgaaaccaatgagcgaacaggaaccagctgaactgatcgaagctgtcaccagcgcttacggtcaggtcgatgtcctggtcagcaacgatatctttgctccagaatttcagccaatcgataaatacgctgtcgaagattacaggggtgctgtcgaagctctgcagatcaggccatttgctctagtgaatgctgtggcttcgcaaatgaagaagcgaaagtcggggcacatcatcttcatcacttcggctactccgttcgggccgtggaaggagctatcgacttacacttcggctcgagctggggcttgtactctagctaatgctctatcgaaggagctaggagagtacaatatcccggtgttcgctatcgggccgaattacctacactcggaggattcgccgtacttctacccgactgagccgtggaagactaatccggagcacgtggctcacgtgaagaaggtgactgctctacaacgactagggactcaaaaagagttgggggaattggtggcatttttggcatctggctcttgtgattatttgactggccaggtgttttggttggcaggcggctttcccatgatagaacgttggcccggcatgcccgaataa

SEQ ID NO: 20 - protein, 254 aa, Artificial Sequence
  HHDH variant
MSPAIVTNVKHFGGMGSALRLSEAGHTVACHDESFKQKDELEAFAETYPQLKPMSEQEPAELIEAVTSAYGQVDVLVSNDIFAPEFQPIDKYAVEDYRGAVEALQIRPFALVNAVASQMKKRKSGHIIFITSATPFGPWKELSTYTSARAGACTLANALSKELGEYNIPVFAIGPNYLHSEDSPYFYPTEPWKTNPEHVAHVKKVTALQRLGTQKELGELVAFLASGSCDYLTGQVFWLAGGFPMIERWPGMPE

SEQ ID NO: 21 - DNA, 765 bp, Artificial Sequence
  HHDH variant
  CDS (1)..(765)
atgagcaccgctatcgtcaccaacgtcaaacattttggtggtatgggtagcgctctgaggctgagcgaagctggtcataccgtcgcttgccatgatgaaagctttaaccagaaagatgaactggaagcttttgctgaaacctacccacagctgaaaccaatgagcgaacaggaaccagctgaactgatcgaagctgtcaccagcgcttacggtcaggtcgatgtcctggtcagcaacgatatctttgctccagaatttcagccaatcgataaatacgctgtcgaagattacaggggtgctgtcgaagctctgcagatcaggccatttgctctagtgaatgctgtggcttcgcaaatgaagaagcgaaagtcggggcacatcatcttcatcacttcggctactccgttcgggccgtggaaggagctatcgacttacacttcggctcgagctggggcttgtactctagctaatgctctatcgaaggagctaggagagtacaatatcccggtgttcgctatcgggccgaattacctacactcggaggattcgccgtacttctacccgactgagccgtggaagactaatccggagcacgtggctcacgtgaagaaggtgactgctctacaacgactagggactcaaaaagagttgggggaattggtggcatttttggcatctggctcttgtgattatttgactggccaggtgttttggttggcaggcggctttcccatgatagaacgttggcccggcgtgcccgaataa

SEQ ID NO: 22 - protein, 254 aa, Artificial Sequence
  HHDH variant
MSTAIVTNVKHFGGMGSALRLSEAGHTVACHDESFNQKDELEAFAETYPQLKPMSEQEPAELIEAVTSAYGQVDVLVSNDIFAPEFQPIDKYAVEDYRGAVEALQIRPFALVNAVASQMKKRKSGHIIFITSATPFGPWKELSTYTSARAGACTLANALSKELGEYNIPVFAIGPNYLHSEDSPYFYPTEPWKTNPEHVAHVKKVTALQRLGTQKELGELVAFLASGSCDYLTGQVFWLAGGFPMIERWPGVPE

SEQ ID NO: 23 - DNA, 765 bp, Artificial Sequence
  HHDH variant
  CDS (1)..(765)
atgagcaccgctatcgtcaccaacgtcaaacattttggtggtatgggtagcgctctgaggctgagcgaagctggtcataccgtcgcttgccatgatgaaagctttaaacagaaagatgaactggaagcttttgctgaaacctacccacagctgaaaccaatgagcgaacaggaaccagctgaactgatcgaagctgtcaccagcgcttacggtcaggtcgatgtcctggtcagcaacgatatctttgctccagaatttcagccaatcgataaatacgctgtcgaagattacaggggtgctgtcgaagctctgcagatcaggccatttgctctagtgaatgctgtggcttcgcaaatgaagaagcgaaagtcggggcacatcatcttcatcacttcggctactccgttcgggccgtggaaggagctatcgacttacacttcggctcgagctggggcttgtactctagctaatgctctatcgaaggagctaggagagtacaatatcccggtgttcgctatcgggccgaattacctacactcggaggattcgccgtacttctacccgactgagccgtggaagactaatccggagcacatggctcacgtgaagaaggtgactgctctacaacgactagggactcaaaaagagttgggggaattggtggcatttttggcatctggctcttgtgattatttgactggccaggtgttttggttggcaggcggctttcccatgatagaacgttggcccggcatgcccgaataa

SEQ ID NO: 24 - protein, 254 aa, Artificial Sequence
  HHDH variant
MSTAIVTNVKHFGGMGSALRLSEAGHTVACHDESFKQKDELEAFAETYPQLKPMSEQEPAELIEAVTSAYGQVDVLVSNDIFAPEFQPIDKYAVEDYRGAVEALQIRPFALVNAVASQMKKRKSGHIIFITSATPFGPWKELSTYTSARAGACTLANALSKELGEYNIPVFAIGPNYLHSEDSPYFYPTEPWKTNPEHMAHVKKVTALQRLGTQKELGELVAFLASGSCDYLTGQVFWLAGGFPMIERWPGMPE

SEQ ID NO: 25 - DNA, 765 bp, Artificial Sequence; identical to SEQ ID NO: 15
  HHDH variant
  CDS (1)..(765)

SEQ ID NO: 26 - protein, 254 aa, Artificial Sequence; identical to SEQ ID NO: 16
  HHDH variant

SEQ ID NO: 27 - DNA, 765 bp, Artificial Sequence; identical to SEQ ID NO: 19
  HHDH variant
  CDS (1)..(756)

SEQ ID NO: 28 - protein, 252 aa, Artificial Sequence
  HHDH variant
MSPAIVTNVKHFGGMGSALRLSEAGHTVACHDESFKQKDELEAFAETYPQLKPMSEQEPAELIEAVTSAYGQVDVLVSNDIFAPEFQPIDKYAVEDYRGAVEALQIRPFALVNAVASQMKKRKSGHIIFITSATPFGPWKELSTYTSARAGACTLANALSKELGEYNIPVFAIGPNYLHSEDSPYFYPTEPWKTNPEHVAHVKKVTALQRLGTQKELGELVAFLASGSCDYLTGQVFWLAGGFPMIERWPGM

SEQ ID NO: 29 - DNA, 765 bp, Artificial Sequence
  HHDH variant
  CDS (1)..(765)
atgagcaccgttatcgtcaccaacgtcaaacattttggtggtatgggtagcgctctgaggctgagcgaagccggtcataccgtcgcttgccatgatgaaagctttaaacagaaagatgaactggaagcttttgctgaaacttacccacagctgaaaccaatgagcgaacaggaaccagctgaactgatcgaagctgtcaccagcgcttacggtcaggtcgatgtcctggtcagcaacgatatctttgctccagaatttcagccaatcgataaatacgctgtcgaagattacaggggtgctgtcgaagctctgcagatcaggccatttgctctagtgaatgctgtggcttcgcaaatgaagaagcgaaagtcggggcacatcatcttcatcacttcggctactccgttcgggccgtggaaggagctatcgacttacacttcggctcgagctggggcttgtactctagctaatgctctatcgaaggagctaggagagtacaatatcccggtgttcgctatcgggccgaattacctacactcggaggattcgccgtacttctacccgactgagccgtggaagactaatccggagcacgtggctcacgtgaagaaggtgactgctctacaacgactagggactcaaaaagagttgggggaattggtggcatttttggcatctggctcttgtgattatttgactggccaggtgttttggttggcaggcggctttcccatgatagaacgttggcccggcatgcccgaataa

SEQ ID NO: 30 - protein, 254 aa, Artificial Sequence
  HHDH variant
MSTVIVTNVKHFGGMGSALRLSEAGHTVACHDESFKQKDELEAFAETYPQLKPMSEQEPAELIEAVTSAYGQVDVLVSNDIFAPEFQPIDKYAVEDYRGAVEALQIRPFALVNAVASQMKKRKSGHIIFITSATPFGPWKELSTYTSARAGACTLANALSKELGEYNIPVFAIGPNYLHSEDSPYFYPTEPWKTNPEHVAHVKKVTALQRLGTQKELGELVAFLASGSCDYLTGQVFWLAGGFPMIERWPGMPE

SEQ ID NO: 31 - DNA, 765 bp, Artificial Sequence
  HHDH variant
  CDS (1)..(765)
atgagcaccgctatcgtcaccaacgtcaaacattttggaggtatgggtagcgctctgaggctgagcgaagctggtcataccgtcgcttgccatgatgaaagctttaaacagaaagatgaactggaagcttttgctgaaacctacccacagctgaaaccaatgagcgaacaggaaccagctgaactgatcgaagctgtcaccagcgcttacggtcaggtcgatgtcctggtcagcaacgatatctttgctccagaatttcagccaatcgataaatacgctgtcgaagattacaggggtgctgtcgaagctctgcagatcaggccatttgctctagtgaatgctgtggcttcgcaaatgaagaagcgaaagtcggggcacatcatcttcatcacttcggctactccgttcgggccatggaaggagctatcgacttacacttcggctcgagctggggcttgtactctagctaatgctctatcgaaggagctaggagagtacaatatcccggtgttcgctatcgggccgaattacctacactcggaggattcgccgtacttctacccgactgagccgtggaagactaatccggagcacgtggctcacgtgaagaaggtgactgctctacaacgactagggactcaaaaagagttgggggaattggtggcatttttggcatctggctcttgtgattatttgactggccaggtgttttggttggcaggcggctttcccatgatagaacgttggcccggcatgcccgaataa

SEQ ID NO: 32 - protein, 254 aa, Artificial Sequence; identical to SEQ ID NO: 2
  HHDH variant

SEQ ID NO: 33 - DNA, 765 bp, Artificial Sequence
  HHDH variant
  CDS (1)..(765)
atgagccccgctatcgtcactaacgtcaaacattttggtggtatgggtaccgctctgaggctgagcgaagctggtcaaaccgtcgcttgccatgatgaaagctttaaacagaaagatgaactggaagcttttgctgaaacctacccacagctgaaaccaatgagcgaacaggaaccagctgaactgatcgaagctgtcaccagcgcttacggtcaggtcgatgtcctggtcagcaacgatatctttgctccagaatttcagccaatcgataaatacgctgtcgaagattacaggggtgctgtcgaagctctgcagatcaggccatttgctctagtgaatgctgtggcttcgcaaatgaagaagcgaaagtcggggcacatcatcttcatcacttcggctactccgttcgggccgtggaaggagctatcgacttacacttcggctcgagctggggcttgtactctagctaatgctctatcgaaggagctaggagagtacaatatcccggtgttcgctatcgggccgaattacctacactcggaggattcgccgtacttctacccgactgagccgtggaagactaatccggagcacgtggctcacgtgaagaaggtgactgctctacaacgactagggactcaaaaagagttgggggaattggtggcatttttggcatctggctcttgtgattatttgactggccaggtgttttggttggcaggcggctttcccatgatagaacgttggcccggcatgcccgaataa

SEQ ID NO: 34 - protein, 254 aa, Artificial Sequence
  HHDH variant
MSPAIVTNVKHFGGMGTALRLSEAGQTVACHDESFKQKDELEAFAETYPQLKPMSEQEPAELIEAVTSAYGQVDVLVSNDIFAPEFQPIDKYAVEDYRGAVEALQIRPFALVNAVASQMKKRKSGHIIFITSATPFGPWKELSTYTSARAGACTLANALSKELGEYNIPVFAIGPNYLHSEDSPYFYPTEPWKTNPEHVAHVKKVTALQRLGTQKELGELVAFLASGSCDYLTGQVFWLAGGFPMIERWPGMPE

SEQ ID NO: 35 - DNA, 765 bp, Artificial Sequence
  HHDH variant
  CDS (1)..(765)
atgagcaccgctatcgtcaccaacgtcaaacattttggaggtatgggtagcgctctgaggctgagcgaagctggtcataccgtcgcttgccatgatgaaagctttaaacagaaagatgaactggaagcttttgctgaaacctacccacagctgaaaccaatgagcgaacaggaaccagctgacctgattgaagctgtcaccagcgcttacggtcaggtcgatgtcctggtcagcaacgatatctttgctccagaatttcagccaatcgataaatacgctgtcgaaaactacaggggtgctgtcgaagctctgcagatcaggccatttgctctagtgaatgctgtggcttcgcaaatgaagaaacgaaagtcggggcacatcatcttcatcacttcggctactccgttcgggccatggaaagagctatcgacttacacttcggctcgagctggggcttgtactctagctaatgctctatcgaaggagctaggagagtacaatatcccggtgttcgctatcgggccgaattacctacactcggaggattcgccgtacttctacccgactgagccgtggaagactaatccggagcacgtggctcacgtgaagaaggtgactgctctacaacgactagggactcaaaaagagttgggggaattggtggcattcctggcatctggctcttgtgattatttgactggccaggtgttttggttggcaggcggctttcccataatagaacgttggcccggcatgcccgaataa

SEQ ID NO: 36 - protein, 254 aa, Artificial Sequence
  HHDH variant
MSTAIVTNVKHFGGMGSALRLSEAGHTVACHDESFKQKDELEAFAETYPQLKPMSEQEPADLIEAVTSAYGQVDVLVSNDIFAPEFQPIDKYAVENYRGAVEALQIRPFALVNAVASQMKKRKSGHIIFITSATPFGPWKELSTYTSARAGACTLANALSKELGEYNIPVFAIGPNYLHSEDSPYFYPTEPWKTNPEHVAHVKKVTALQRLGTQKELGELVAFLASGSCDYLTGQVFWLAGGFPIIERWPGMPE

SEQ ID NO: 37 - DNA, 765 bp, Artificial Sequence
  HHDH variant
  CDS (1)..(765)
atgagcaccgctatcgtcaccaacgtcaaacattttggaggtatgggtagcgctctgaggctgagcgaagctggtcataccgtcgcttgccatgatgaaagctttaaacagaaagatgaactggaagcttttgctgaaacctacccacagctgaaaccaatgagcgaacaggaaccagctgaactgatcgaagctgtcaccagcgcttacggtcaggtcgatgtcctggtcagcaacgatatctttgctccagaatttcagccaatcgataaatacgctgtccaagattacaggggtgctgtcgaagctctgcagatcaggccatttgctctagtgaatgctgtggctccgcaaatgaagaagcgaaagtcggggcacatcatcttcatcacttcggctactccgttcgggccatggaaggagctatcgacttacacttcggctcgagctggggcttgttctctagctaatgctctatcgaaggagctaggagagtacaatgtgccggtgttcgctatcgggccgaattacctacactcgggggattcgccgtacttctacccgactgagccgtggaagactaatccggagcacgtggctcacgtgaagaaggtgactgctctacaacgactagggactcaaaaagagttgggggaattggtggcattcttggcatctggctcttgtgattatttgactggccaggtgttttggttggcaggcggctttcccatgatagaacgttggcccggcatgcccgaataa

SEQ ID NO: 38 - protein, 254 aa, Artificial Sequence
  HHDH variant
MSTAIVTNVKHFGGMGSALRLSEAGHTVACHDESFKQKDELEAFAETYPQLKPMSEQEPAELIEAVTSAYGQVDVLVSNDIFAPEFQPIDKYAVQDYRGAVEALQIRPFALVNAVAPQMKKRKSGHIIFITSATPFGPWKELSTYTSARAGACSLANALSKELGEYNVPVFAIGPNYLHSGDSPYFYPTEPWKTNPEHVAHVKKVTALQRLGTQKELGELVAFLASGSCDYLTGQVFWLAGGFPMIERWPGMPE

SEQ ID NO: 39 - DNA, 765 bp, Artificial Sequence
  HHDH variant
  CDS (1)..(765)
atgagcaccgctatcgtcaccaacgtcaaacattttggaggtatgggtagcgctctgaggctgagcgaagctggtcataccgtcgcttgccatgatgaaagctttaaacagaaagatgaactggaagcttttgctgaaacctacccacagctgaaaccaatgagcgaacaggaaccagctgaactgattgaagctgtcaccagcgcttacggtcaggtcgatgtcctggtcagcaacgatatctttgctccagaatttcagccaatcgataaatacgctgtcgaagattacaggggtgctgtcgaagctctgcagatcaggccatttgctctagtgaatgctgtggcttcgcaaatgaagaaacgaaagtcggggcacatcatcttcatcacttcggctactccgttcgggccatggaaagagctatcgacttacacttcggctcgagctggggcttgtactctagctaatgctctatcgaaggagctaggagagtacaatatcccggtgttcgctatcgggccgaattacctacactcggaggattcgccgtacttctacccgactgagccgtggaagactaatccggagcacgtggctcacgtgaagaaggtgactgctctacaacgactagggactcaaaaagagttgggggaattggtggcattcctggcatctggctcttgtgattatttgactggccaggtgttttggttggcaggcggctttcccataatagaacgttggcccggcatgcccgaataa

SEQ ID NO: 40 - protein, 254 aa, Artificial Sequence
  HHDH variant
MSTAIVTNVKHFGGMGSALRLSEAGHTVACHDESFKQKDELEAFAETYPQLKPMSEQEPAELIEAVTSAYGQVDVLVSNDIFAPEFQPIDKYAVEDYRGAVEALQIRPFALVNAVASQMKKRKSGHIIFITSATPFGPWKELSTYTSARAGACTLANALSKELGEYNIPVFAIGPNYLHSEDSPYFYPTEPWKTNPEHVAHVKKVTALQRLGTQKELGELVAFLASGSCDYLTGQVFWLAGGFPIIERWPGMPE

SEQ ID NO: 41 - DNA, 765 bp, Artificial Sequence
  HHDH variant
  CDS (1)..(765)
atgagcaccgctatcgtcaccaacgtcaaacattttggaggtatgggtagcgctctgaggctgagcgaagctggtcataccgtcgcttgccatgatgaaagctttaaacagaaagatgaactggaagcttttgctgaaacctacccacagctgaaaccaatgagcgaacaggaaccagctgacctgattgaagctgtcaccagcgcttacggtcaggtcgatgtcctggtcagcaacgatatctttgctccagaatttcagccaatcgataaatacgctgtcgaagactacaggggtgctgtcgaagctctgcagatcaggccatttgctctagtgaatgctgtggcttcgcaaatgaagaaacgaaagtcggggcacatcatcttcatcacttcggctactccgttcgggccatggaaagagctatcgacttacacttcggctcgagctggggcttgtactctagctaatgctctatcgaaggagctaggagagtacaatatcccggtgttcgctatcgggccgaattacctacactcggaggattcgccgtacttctacccgactgagccgtggaagactaatccggagcacgtggctcacgtgaagaaggtgactgctctacaacgactagggactcaaaaagagttgggggaattggtggcattcctggcatctggctcttgtgattatttgactggccaggtgttttggttggcaggcggctttcccattatagaacgttggcccggcatgcccgaataa

SEQ ID NO: 42 - protein, 254 aa, Artificial Sequence
  HHDH variant
MSTAIVTNVKHFGGMGSALRLSEAGHTVACHDESFKQKDELEAFAETYPQLKPMSEQEPADLIEAVTSAYGQVDVLVSNDIFAPEFQPIDKYAVEDYRGAVEALQIRPFALVNAVASQMKKRKSGHIIFITSATPFGPWKELSTYTSARAGACTLANALSKELGEYNIPVFAIGPNYLHSEDSPYFYPTEPWKTNPEHVAHVKKVTALQRLGTQKELGELVAFLASGSCDYLTGQVFWLAGGFPIIERWPGMPE

SEQ ID NO: 43 - DNA, 768 bp, Artificial Sequence
  HHDH variant
  CDS (1)..(768)
atgagcaccgctattgtcaccaacgtcaaacattttggaggtatgggtagcgctctgaaactgagcgaagctggtcataccgtcgcttgccatgatggtagctttaagcataaagatgaactggaagcttttgctgaagcctacccacagctgaaaccaatgagcgaacaggaaccagctgaactgattgaagctgtcaccagcgcttttggtcatgtcgatgtcctggtcagcaacgatatctttgctctagaatttcggccaatcgataaatacgctgtcgaggattacaggggtgctgtcgaagctctgcagatcaggccatttgctctagtgaatgctgtggctccacaaatgaagaagcgaaagtcggggcacatcatcttcatcacttcggctgccccgttcgggccatggaaggagctatcgacttactcttcggctcgagctggggctagtgcactagctaatgctctatcgaaggagctaggagagtacaatatcccggtgttcgctatcgggccgaattacctacactcggaggattcgccgttctattaccccactgagccgtggaagattaatccggagcacgtggctcacgtgaagaaggtgactgctctacaacgactagggactcaaaaagagttgggggaattggtggcatttttggcatctggctcttgtgattatttgactggccaggtgttttggttggcaggcggctttcccgctatagaacgttggcccggcatgcccgaataatga

SEQ ID NO: 44 - protein, 254 aa, Artificial Sequence
  HHDH variant
MSTAIVTNVKHFGGMGSALKLSEAGHTVACHDGSFKHKDELEAFAEAYPQLKPMSEQEPAELIEAVTSAFGHVDVLVSNDIFALEFRPIDKYAVEDYRGAVEALQIRPFALVNAVAPQMKKRKSGHIIFITSAAPFGPWKELSTYSSARAGASALANALSKELGEYNIPVFAIGPNYLHSEDSPFYYPTEPWKINPEHVAHVKKVTALQRLGTQKELGELVAFLASGSCDYLTGQVFWLAGGFPAIERWPGMPE

SEQ ID NO: 45 - DNA, 765 bp, Artificial Sequence
  HHDH variant
  CDS (1)..(765)
atgagcaccgctatcgtcaccaacgtcaaacattttggaggtatgggtagcgctctgaggctgagcgaagctggtcataccgtcgcttgccatgatgaaagctttaaacagaaagatgaactggaagcttttgctgaaacctacccacagctgaaaccaatgagcgaacaggaaccagctgaactgatcgaagctgtcaccagcgcttacggtcaggtcgatgtcctggtcagcaacgatatctttgctccagaatttcagccaatcgataaatacgctgtcgaagattacaggggtgctgtcgaagctctgcagatcaggccatttgctctagtgaatgctgtggcttcgcaaatgaagaagcgaaagtcggggcacatcatcttcatcacttcggctgctccgttcgggccatggaaagagctatcgacttacacttcggctcgagctggggcttgtactctagctaatgctctatcgaaggagctaggagagtacaatatcccggtgttcgctatcgggccgaattacctacactcggaggattcgccgtacttctacccgactgagccgtggaagactaatccggagcacgtggctcacgtgaagaaggtgactgctctacaacgactagggactcaaaaagagttgggggaattggtggcattcttggcatctggctcttgtgattatttgactggccaggtgttttggttggcaggcggctttcccatgatagaacgttggcccggcatgcccgaataa

SEQ ID NO: 46 - protein, 254 aa, Artificial Sequence
  HHDH variant
MSTAIVTNVKHFGGMGSALRLSEAGHTVACHDESFKQKDELEAFAETYPQLKPMSEQEPAELIEAVTSAYGQVDVLVSNDIFAPEFQPIDKYAVEDYRGAVEALQIRPFALVNAVASQMKKRKSGHIIFITSAAPFGPWKELSTYTSARAGACTLANALSKELGEYNIPVFAIGPNYLHSEDSPYFYPTEPWKTNPEHVAHVKKVTALQRLGTQKELGELVAFLASGSCDYLTGQVFWLAGGFPMIERWPGMPE

SEQ ID NO: 47 - DNA, 765 bp, Artificial Sequence
  HHDH variant
  CDS (1)..(765)
atgagcaccgctatcgtcaccaacgtcaaacattttggaggtatgggtagcgctctgaggctgagcgaagctggtcataccgtcgcttgccatgatgaaagctttaaacagaaagatgaactggaagcttttgctgaaacctacccacagctgaaaccaatgagcgaacaggaaccagctgaactgatcgaagctgtcaccagcgcttacggtcaggtcgatgtcctggtcagcaacgatatctttgctccagaatttcagccaatcgataaatacgctgtccaagattacaggggtgctgtcgaagctctgcagatcaggccatttgctctagtgaatgctgtggcttcgcaaatgaagaagcgaaagtcggggcacatcatcttcatcacttcggctactccgttcgggccatggaaggagctatcgagttacacttcggctcgagctggggcttgttctctagctaatgctctatcgaaggagctaggagagtacaatatcccggtgttcgctatcgggccgaattacctacactcggaggattcgccgtacttctacccgactgagccgtggaagactaatccggagcacgtggctcacgtgaagaaggtgactgctctacaacgactagggactcaaaaagagttgggggaattggtggcatttttggcatctggctcttgtgattatttgactggccaggtgttttggttggcaggcggctttcccatgatagaacgttggcccggcatgcccgaataa

SEQ ID NO: 48 - protein, 254 aa, Artificial Sequence
  HHDH variant
MSTAIVTNVKHFGGMGSALRLSEAGHTVACHDESFKQKDELEAFAETYPQLKPMSEQEPAELIEAVTSAYGQVDVLVSNDIFAPEFQPIDKYAVQDYRGAVEALQIRPFALVNAVASQMKKRKSGHIIFITSATPFGPWKELSSYTSARAGACSLANALSKELGEYNIPVFAIGPNYLHSEDSPYFYPTEPWKTNPEHVAHVKKVTALQRLGTQKELGELVAFLASGSCDYLTGQVFWLAGGFPMIERWPGMPE

SEQ ID NO: 49 - DNA, 765 bp, Artificial Sequence
  HHDH variant
  CDS (1)..(765)
atgagcaccgctatcgtcaccaacgtcaaacattttggaggtatgggtagcgctctgaggctgagcgaagctggtcataccgtcgcttgccatgatgaaagctttaaacagaaagatgaactggaagcttttgctgaaacctacccacagctgaaaccaatgagcgaacaggaaccagctgaactgatcgaagctgtcaccagcgcttacggtcaggtcgatgtcctggtcagcaacgatatctttgctccagaatttcagccaatcgataaatacgctgtccaggattacaggggtgctgtcgaagctctgcagatcaagccatttgctctagtgaatgctgtggcttcgcaaatgaagaagcgaaagtcggggcacatcatcttcatcacttcggctactccgttcgggccatggaaggagctatcgacttacacttcggctcgagctggggcttgtactctagctaatgctctatcgaaggagctaggagagtacaatatcccggtgttcgctatcgggccgaattacctacactcggaggattcgccgtacttctacccgactgagccgtggaagactaatccggagcacgtggctcacgtgaagaaggtgactgctctacaacgactagggactcaaaaagagttgggggaattggtggcatttttggcatctggctcttgtgattatttgactggccaggtgttttggttggcaggcggctttcccatgatagaacgttggcccggcatgcccgaataa

SEQ ID NO: 50 - protein, 254 aa, Artificial Sequence
  HHDH variant
MSTAIVTNVKHFGGMGSALRLSEAGHTVACHDESFKQKDELEAFAETYPQLKPMSEQEPAELIEAVTSAYGQVDVLVSNDIFAPEFQPIDKYAVQDYRGAVEALQIKPFALVNAVASQMKKRKSGHIIFITSATPFGPWKELSTYTSARAGACTLANALSKELGEYNIPVFAIGPNYLHSEDSPYFYPTEPWKTNPEHVAHVKKVTALQRLGTQKELGELVAFLASGSCDYLTGQVFWLAGGFPMIERWPGMPE

SEQ ID NO: 51 - DNA, 765 bp, Artificial Sequence
  HHDH variant
  CDS (1)..(765)
atgagcaccgctatcgtcaccaacgtcaaacattttggaggtatgggtagcgctctgaggctgagcgaagctggtcataccgtcgcttgccatgatgaaagctttaaacagaaagatgaactggaagcttttgctgaaacctacccacagctgaaaccaatgagcgaacaggaaccagctgaactgatcgaagctgtcaccagcgcttacggtcaggtcgatgtcctggtcagcaacgatatctttgctccagaatttcagccaatcgataaatacgctgtccaggattacaggggtgctgtcgaagctctgcagatcaggccatttgctctggcgaatgctgtggcttcgcaaatgaagaagcgaaagtcggggcacatcatcttcatcacttcggctgctccgttcgggccatggaaggagctatcgacttacacttcggctcgagctggggcttgtactctagctaatgctctatcgaaggagctaggagagtacaatatcccggtgttcgctatcgggccgaattacctacactcggaggattcgccgtacttctacccgactgagccgtggaagactaatccggagcacgtggctcacgtgaagaaggtgactgctctacaacgactagggactcaaaaagagttgggggaattggtggcatttttggcatctggctcttgtgattatttgactggccaggtgttttggttggcaggcggctttcccatgatagaacgttggcccggcatgcccgaataa

SEQ ID NO: 52 - protein, 254 aa, Artificial Sequence
  HHDH variant
MSTAIVTNVKHFGGMGSALRLSEAGHTVACHDESFKQKDELEAFAETYPQLKPMSEQEPAELIEAVTSAYGQVDVLVSNDIFAPEFQPIDKYAVQDYRGAVEALQIRPFALANAVASQMKKRKSGHIIFITSAAPFGPWKELSTYTSARAGACTLANALSKELGEYNIPVFAIGPNYLHSEDSPYFYPTEPWKTNPEHVAHVKKVTALQRLGTQKELGELVAFLASGSCDYLTGQVFWLAGGFPMIERWPGMPE

SEQ ID NO: 53 - DNA, 765 bp, Artificial Sequence
  HHDH variant
  CDS (1)..(765)
atgaccaccgctatcgtcaccaacgtcaaacattttggaggtatgggtagcgctctgaggctgagcgaagctggtcataccgtcgcttgccatgatgaaagctttaaacagaaagatgaactggaagcttttgctgaaacctacccacagctgaaaccaatgagcgaacaggaaccagctgaactgatcgaagctgtcaccagcgcttacggtcaggtcgatgtcctggtcagcaacgatatctttgctccagaatttcagccaatcgataaatacgctgtcgaagattacaggggtgctgtcgaagctctgcagatcaggccatttgctctagtgaatgctgtggcttcgcaaatgaagaagcgaaagtcggggcacatcatcttcatcacttcggctactccgttcgggccatggaaggagctatcgacttacacttcggctcgagctggggcttgttctctagctaatgctctatcgaaggagctaggagagtacaatatcccggtgttcgctatcgggccgaattacctacactcggaggattcgccgtacttctacccgactgagccgtggaagactaatccggagcacgtggctcacgtgaagaaggtgactgctctacaacgactagggactcaaaaagagttgggggaattggtggcatttttggcatctggctcttgtgattatttgactggccaggtgttttggttggcaggcggctttcccatgatagaacgttggcccggcatgcccgaataa

SEQ ID NO: 54 - protein, 254 aa, Artificial Sequence
  HHDH variant
MTTAIVTNVKHFGGMGSALRLSEAGHTVACHDESFKQKDELEAFAETYPQLKPMSEQEPAELIEAVTSAYGQVDVLVSNDIFAPEFQPIDKYAVEDYRGAVEALQIRPFALVNAVASQMKKRKSGHIIFITSATPFGPWKELSTYTSARAGACSLANALSKELGEYNIPVFAIGPNYLHSEDSPYFYPTEPWKTNPEHVAHVKKVTALQRLGTQKELGELVAFLASGSCDYLTGQVFWLAGGFPMIERWPGMPE

SEQ ID NO: 55 - DNA, 765 bp, Artificial Sequence
  HHDH variant
  CDS (1)..(765)
atgagcaccgctatcgtcaccaacgtcaaacattttggaggtatgggtagcgctctgaggctgagcgaagctggtcataccgtcgcttgccatgatgaaagctttaaacagaaagatgaactggaagcttttgctgaaacctacccacagctgaaaccaatgagcgaacaggaaccagctgaactgattgaagctgtcaccagcgcttacggtcaggtcgatgtcctggtcagcaacgatatctttgctccagaatttcagccaatcgataaatacgctgtcgaaaactacaggggtgctgtcgaagctctgcagatcaggccatttgctctagtgaatgctgtggcttcgcaaatgaagaaacgaaagtcggggcacatcatcttcatcacttcggctactccgttcgggccatggaaagagctatcgacttacacttcggctcgagctggggcttgtactctagctaatgctctatcgaaggagctaggagagtacaatatcccggtgttcgctatcgggccgaattacctacactcggaggattcgccgtacttctacccgactgagccgtggaagactaatccggagcacgtggctcacgtgaagaaggtgactgctctacaacgactagggactcaaaaagagttgggggaattggtggcattcctggcatctggctcttgtgattatttgactggccaggtgttttggttggcaggcggctttcccataatagaacgttggcccggcatgcccgaataa

SEQ ID NO: 56 - protein, 254 aa, Artificial Sequence
  HHDH variant
MSTAIVTNVKHFGGMGSALRLSEAGHTVACHDESFKQKDELEAFAETYPQLKPMSEQEPAELIEAVTSAYGQVDVLVSNDIFAPEFQPIDKYAVENYRGAVEALQIRPFALVNAVASQMKKRKSGHIIFITSATPFGPWKELSTYTSARAGACTLANALSKELGEYNIPVFAIGPNYLHSEDSPYFYPTEPWKTNPEHVAHVKKVTALQRLGTQKELGELVAFLASGSCDYLTGQVFWLAGGFPIIERWPGMPE

SEQ ID NO: 57 - DNA, 765 bp, Artificial Sequence
  HHDH variant
  CDS (1)..(765)
atgagcaccgctatcgtcaccaacgtcaaacattttggaggtatgggtagcgctctgaggctgagcgaagctggtcataccgtcgcttgccatgatgaaagctttaaacagaaagatgaactggaagcttttgctgaaacctacccacagctgaaaccaatgagcgaacaggaaccagctgaactgatcgaagctgtcaccagcgcttacggtcaggtcgatgtcctggtcagcaacgatatctttgctccagaatttcagccaatcgataaatacgctgtcgaagattacaggggtgctgtcgaagctctgcagatcaggccatttgctctagtgaatgctgtggcttcgcaaatgaagaagcgaaagtcggggcacatcatcttcatcacttcggctactccgttcgggccatggaaggagctatcgacttacacttcggctcgagctggggctagtactctagctaatgctctatcgaaggagctaggagagtacaatatcccggtgttcgctatcgggccgaattacctacactcggaggattcgccgtacttctacccgactgagccgtggaagactaatccggagcacgtggctcacgtgaagaaggtgactgctctacaacgactagggactcaaaaagagttgggggaattggtggcatttttggcatctggctcttgtgattatttgactggccaggtgttttggttggcaggcggctttcccatgatagaacgttggcccggcatgcccgaataa

SEQ ID NO: 58 - protein, 254 aa, Artificial Sequence
  HHDH variant
MSTAIVTNVKHFGGMGSALRLSEAGHTVACHDESFKQKDELEAFAETYPQLKPMSEQEPAELIEAVTSAYGQVDVLVSNDIFAPEFQPIDKYAVEDYRGAVEALQIRPFALVNAVASQMKKRKSGHIIFITSATPFGPWKELSTYTSARAGASTLANALSKELGEYNIPVFAIGPNYLHSEDSPYFYPTEPWKTNPEHVAHVKKVTALQRLGTQKELGELVAFLASGSCDYLTGQVFWLAGGFPMIERWPGMPE

SEQ ID NO: 59 - DNA, 765 bp, Artificial Sequence
  HHDH variant
  CDS (1)..(765)
atgagcaccgctatcgtcaccaacgtcaaacattttggaggtatgggtagcgctctgaggctgagcgaagctggtcataccgtcgctgcgcatgatgaaagctttaaacagaaagatgaactggaagcttttgctgaaacctacccacagctgaaaccaatgagcgaacaggaaccagctgaactgatcgaagctgtcaccagcgcttacggtcaggtcgatgtcctggtcagcaacgatatctttgctccagaatttcagccaatcgataaatacgctgtcgaagattacaggggtgctgtcgaagctctgcagatcaggccatttgctctagtgaatgctgtggcttcgcaaatgaagaagcgaaagtcggggcacatcatcttcatcacttcggctactccgttcgggccatggaaggagctatcgacttacacttcggctcgagctggggcttgtactctagctaatgctctatcgaaggagctaggagagtacaatatcccggtgttcgctatcgggccgaattacctacactcggaggattcgccgtacttctacccgactgagccgtggaagactaatccggagcacgtggctcacgtgaagaaggtgactgctctacaacgactagggactcaaaaagagttgggggaattggtggcatttttggcatctggctcttgtgattatttgactggccaggtgttttggttggcaggcggctttcccatgatagaacgttggcccggcatgcccgaataa

SEQ ID NO: 60 - protein, 254 aa, Artificial Sequence
  HHDH variant
MSTAIVTNVKHFGGMGSALRLSEAGHTVAAHDESFKQKDELEAFAETYPQLKPMSEQEPAELIEAVTSAYGQVDVLVSNDIFAPEFQPIDKYAVEDYRGAVEALQIRPFALVNAVASQMKKRKSGHIIFITSATPFGPWKELSTYTSARAGACTLANALSKELGEYNIPVFAIGPNYLHSEDSPYFYPTEPWKTNPEHVAHVKKVTALQRLGTQKELGELVAFLASGSCDYLTGQVFWLAGGFPMIERWPGMPE

SEQ ID NO: 61 - DNA, 765 bp, Artificial Sequence
  HHDH variant
  CDS (1)..(765)
atgagcaccgctatcgtcaccaacgtcaaacattttggaggtatgggtagcgctctgaggctgagcgaagctggtcataccgtcgcttgccatgatgaaagctttaaacagaaagatgaactggaagcttttgctgaaacctacccacagctgaaaccaatgagcgaacaggaaccagctgaactgatcgaagctgtcaccagcgcttacggtcaggtcgatgtcctggtcagcaacgatatctttgctccagaatttcagccaatcgataaatacgctgtcgaagattacaggggtgctgtcgaagctctgcagatcaggccatttgctctagtgaatgctgtggcttcgcaaatgaagaagcgaaagtcggggcacatcatcttcatcacttcggctactccgttcgggccatggaaagagctatcgacttacacttcggctcgagctggggcttgtgctctagctaatgctctatcgaaggagctaggagagtacaatatcccggtgttcgctatcgggccgaattacctacactcggaggattcgccgtacttctacccaactgagccgtggaagactaatccggagcacgtggctcacgtgaagaaggtgactgctctacaacgactagggactcaaaaagagttgggggaattggtggcattcctggcatctggctcttgtgattatttgactggccaggtgttttggttggcaggcggctttcccattatcgaacgttggcccggcatgcccgaataa

SEQ ID NO: 62 - protein, 254 aa, Artificial Sequence
  HHDH variant
MSTAIVTNVKHFGGMGSALRLSEAGHTVACHDESFKQKDELEAFAETYPQLKPMSEQEPAELIEAVTSAYGQVDVLVSNDIFAPEFQPIDKYAVEDYRGAVEALQIRPFALVNAVASQMKKRKSGHIIFITSATPFGPWKELSTYTSARAGACALANALSKELGEYNIPVFAIGPNYLHSEDSPYFYPTEPWKTNPEHVAHVKKVTALQRLGTQKELGELVAFLASGSCDYLTGQVFWLAGGFPIIERWPGMPE

SEQ ID NO: 63 - DNA, 765 bp, Artificial Sequence; identical to SEQ ID NO: 61
  HHDH variant
  CDS (1)..(765)

SEQ ID NO: 64 - protein, 254 aa, Artificial Sequence; identical to SEQ ID NO: 62
  HHDH variant

SEQ ID NO: 65 - DNA, 765 bp, Artificial Sequence; identical to SEQ ID NO: 61
  HHDH variant
  CDS (1)..(765)

SEQ ID NO: 66 - protein, 254 aa, Artificial Sequence; identical to SEQ ID NO: 62
  HHDH variant

SEQ ID NO: 67 - DNA, 765 bp, Artificial Sequence
  HHDH variant
  CDS (1)..(765)
atgagcaccgctatcgtcaccaacgtcaaacattttggaggtatgggtagcgctctggggctgagcgaagctggtcataccgtcgcttgccatgatgaaagctttaaacacaaagatgaactggaagcttttgctgaaacctacccacagctgaaaccaatgagcgaacaggatccagctgacctgattgaagctgtcaccagcgcttacggtcaggtcgatgtcctggtcagcaacgatatctttgctccagaatttcagccaatcgataaatacgctgtcgaagattacaggggtgctgtcgaagctctgcagatcaggccatttgctctagtgaatgctgtggcttcgcaaatgaagaaacgaaagtcggggcacatcatcttcatcacttcggctactccgttcgggccatggaaagagctatcgacttacacttcggctcgagctggggcttgtactctagctaatgctctatcgaaggagctaggagagtacaatgtgccggtgttcgctatcgggccgaattacctacactcggaggattcgccgtacttctacccgactgagccgtggaagactaatccggagcacgtggctcacgtgaagaaggtgactgctctacaacgactagggactcaaaaagagttgggggaattggtggcatttttggcatctggctcttgtgattatttgactggccaggtgttttggttggcaggcggctttcccattatcgaacgttggcccggcatgcccgaataa

SEQ ID NO: 68 - protein, 254 aa, Artificial Sequence
  HHDH variant
MSTAIVTNVKHFGGMGSALGLSEAGHTVACHDESFKHKDELEAFAETYPQLKPMSEQDPADLIEAVTSAYGQVDVLVSNDIFAPEFQPIDKYAVEDYRGAVEALQIRPFALVNAVASQMKKRKSGHIIFITSATPFGPWKELSTYTSARAGACTLANALSKELGEYNVPVFAIGPNYLHSEDSPYFYPTEPWKTNPEHVAHVKKVTALQRLGTQKELGELVAFLASGSCDYLTGQVFWLAGGFPIIERWPGMPE

SEQ ID NO: 69 - DNA, 765 bp, Artificial Sequence
  HHDH variant
  CDS (1)..(765)
atgagcaccgctatcgtcaccaacgtcaaacattttggaggtatgggtagcgctctgaggctgagcgaagctggtcataccgtcgcttgccatgatgaaagctttaaacagaaagatgaactggaagcttttgctgaaacctacccacagctgaaaccaatgagcgaacaggaaccagctgaactgatcgaagctgtcaccagcgcttacggtcaggtcgatgtcctggtcagcaacgatatctttgctccagaatttcagccaatcgataaatacgctgtccaggattacaggggtgctgtcgaagctctgcagatcaggccatttgctctagtgaatgctgtggcttcgcaaatgaagaagcgaaagtcggggcacatcatcttcatcacttcggctgctccgttcgggccatggaaggagctatcgacttacacttcggctcgagctggggcttgttccctagctaatgctctatcgaaggagctaggagagtacaatatcccggtgttcgctatcgggccgaattacctacactcggaggattcgccgtacttctacccgactgagccgtggaagactaatccggagcacgtggctcacgtgaagaaggtgactgctctacaacgactagggactcaaaaagagttgggggaattggtggcatttttggcatctggctcttgtgattatttgactggccaggtgttttggttggcaggcggctttcccatgatagaacgttggcccggcatgcccgaataa

SEQ ID NO: 70 - protein, 254 aa, Artificial Sequence
  HHDH variant
MSTAIVTNVKHFGGMGSALRLSEAGHTVACHDESFKQKDELEAFAETYPQLKPMSEQEPAELIEAVTSAYGQVDVLVSNDIFAPEFQPIDKYAVQDYRGAVEALQIRPFALVNAVASQMKKRKSGHIIFITSAAPFGPWKELSTYTSARAGACSLANALSKELGEYNIPVFAIGPNYLHSEDSPYFYPTEPWKTNPEHVAHVKKVTALQRLGTQKELGELVAFLASGSCDYLTGQVFWLAGGFPMIERWPGMPE

SEQ ID NO: 71 - DNA, 765 bp, Artificial Sequence
  HHDH variant
  CDS (1)..(765)
atgagcaccgctatcgtcaccaacgtcaaacattttggtggtatgggtagcgctctgaggctgagcgaagctggtcataccgtcgcttgccatgatgaaagctttaaacagaaagatgaactggaagcttttgctgaaacctacccacagctgaaaccaatgagcgaacaggaaccagctgaactgatcgaagctgtcaccagcgcttacggtcaggtcgatgtcctggtcagcaacgatatctttgctccagaatttcagccaatcgataaatacgctgtcgaagattacaggggtgctgtcgaagctctgcagatcaggccatttgctctagtgaatgctgtggcttcgcaaatgaagaagcgaaagtcggggcacatcatcttcatcacttcggctactccgttcgggccgtggaaggagctatcgacttacacttcggctcgagctggggcttgtactctagctaatgctctatcgaaggagctaggagagtacaatatcccggtgttcgctatcgggccgaattacctacactcggaggattcgccgtacttctacccgactgagccgtggaagactaatccggagcacgtggctcacgtgaagaaggtgactgctctacaacgactagggactcaaaaagagttgggggaattggtggcatttttggcatctggctcttgtgattatttgactggccaggtgttttggttggcaggcggctttcccatgatagaacgttggcccggcatgcccgaataa

SEQ ID NO: 72 - protein, 254 aa, Artificial Sequence; identical to SEQ ID NO: 2
  HHDH variant

SEQ ID NO: 73 - DNA, 765 bp, Artificial Sequence
  HHDH variant
  CDS (1)..(765)
atgagcaccgctatcgtcaccaacgtcaaacattttggaggtatgggtagtgctctgaggctgtcggaggctggtcacaccgtcgcttgccatgatgaaagctttaaacagaaagatgaactggaggcttttgctgaaacctacccacagctgaaaccaatgagcgaacaggaaccagctggactgattgaagctgtcaccagcgcttacggtcaggtcgatgtcctggtcagcaacgatatctttgctccagaatttcagccaatcgataaatacgctgtcgaagattacaggggtgctgtcgaagctctgcagatcaggccatttgctctagtgaatgctgtggcttcgcaaatgaagaagcgaaagtcggggcacatcatcttcatcacttcggctactccgttcgggccatggaaggagctatcgacttacacttcggctcgagctggggcttgtactctagctaatgctctatcgaaggagctaggagagtacaatatcccggtgttcgctatcgggccgaattacctacactcggaggattcgccgtacttctacccgactgagccgtggaagactaatccggagcacgtggctcacgtgaagaaggtgactgctctacaacgactagggactcaaaaagagttgggggaattggtggcatttttggcatctggctcttgtgattatttgactggccaggtgttttggttggcaggcggctttcccatgatagaacgttggcccggcatgcccgaataa

SEQ ID NO: 74 - protein, 254 aa, Artificial Sequence
  HHDH variant
MSTAIVTNVKHFGGMGSALRLSEAGHTVACHDESFKQKDELEAFAETYPQLKPMSEQEPAGLIEAVTSAYGQVDVLVSNDIFAPEFQPIDKYAVEDYRGAVEALQIRPFALVNAVASQMKKRKSGHIIFITSATPFGPWKELSTYTSARAGACTLANALSKELGEYNIPVFAIGPNYLHSEDSPYFYPTEPWKTNPEHVAHVKKVTALQRLGTQKELGELVAFLASGSCDYLTGQVFWLAGGFPMIERWPGMPE

SEQ ID NO: 75 - DNA, 765 bp, Artificial Sequence
  HHDH variant
  CDS (1)..(765)
atgagcaccgctatcgtcaccaacgtcaaacattttggaggtatgggtagcgctctgaggctgagcgaagctggtcataccgtcgcttgccatgatgaaagctttaaacagaaagatgaactggaagcttttgctgaaacctacccacagctgaaaccaatgagcgaacaggaaccagctgaactgatcgaagctgtcaccagcgcttacggtcaggtcgatgtcctggtcagcaacgatatctttgctccagaatttcagccaatcgataaatacgctgtcgaagattatcgtggtgctgtcgaagctctgcagatcaggccatttgctctagtgaatgctgtggcttcgcaaatgaagaagcgaaagtcggggcacatcatcttcatcacttcggctactccgttcgggccatggaaggagctatcgacttacacttcggctcgagctggggcttgtactctagctaatgctctatcgaaggagctaggagagtacaatatcccggtgttcgctatcgggccgaattacctacactcggaggattcgccgtacttctacccgactgagccgtggaagactaatccggaacacgtggctcacgtgaagaaggtgactgctctacaacgactagggactcaaaaagagttgggggaattggtggcatttttggcatctggctcttgtgattatttgactggccaggtgttttggttggcaggcggctttcccatgatagaacgttggcccggcatgcccgaataa

SEQ ID NO: 76 - protein, 254 aa, Artificial Sequence; identical to SEQ ID NO: 2
  HHDH variant

SEQ ID NO: 77 - DNA, 765 bp, Artificial Sequence
  HHDH variant
  CDS (1)..(765)
atgagcaccgctatcgtcaccaacgtcaaacattttggaggtatgggtagcgctctgaggctgagcgaagctggtcataccgtcgcttgccatgatgaaagctttaaacagaaagatgaactggaagcttttgctgaaacctacccacagctgaaaccaatgagcgaacaggaaccagctgaactgatcgaagctgtcaccagcgcttacggtcaggtcgatgtcctggtcagcaacgatatctttgctccagaatttcagccaatcgataaatacgctgtcgaagattacaggggtgctgtcgaagctctgcagatcaggccatttgctctagtgaatgctgtggcttcgcaaatgaagaagcgaaagtcggggcacatcatcttcatcacttcggctactccgttcgggccatggaaagagctatcgacttacacttcggctcgagctggggcttgtactctagctaatgctctatcgaaggagctaggagagtacaatatcccggtgttcgctatcgggccgaattacctacactcggaggattcgccgtacttctacccgactgagccgtggaagactaatccggagcacgtggctcacgtgaagaaggtgactgctctacaacgactagggactcaaaaagagttgggggaattggtggcattcctggcatctggctcttgtgattatttgactggccaggtgttttggttggcaggcggctttcccattatcgaacgttggcccggcatgcccgaataa

SEQ ID NO: 78 - protein, 254 aa, Artificial Sequence; identical to SEQ ID NO: 40
  HHDH variant

SEQ ID NO: 79 - DNA, 765 bp, Artificial Sequence
  HHDH variant
  CDS (1)..(765)
atgaccaccgctatcgtcaccaacgtcaaacattttggaggtatgggtagcgctctgaggctgagcgaagctggtcataccgtcgcttgccatgatgaaagctttaaacagaaagatgaactggaagcttttgctgaaacctacccacagctgaaaccaatgagcgaacaggaaccagctgaactgatcgaagctgtcaccagcgcttacggtcaggtcgatatcctggtcagcaacgatatctttgctccagaatttcagccaatcgataaatacgctgtccaggattacaggggtgctgtcgaagctctgcagatcaggccatttgctctagtgaatgctgtggcttcgcaaatgaagaagcgaaagtcggggcacatcatcttcatcacttcggctgctccgttcgggccatggaaggagctatcgacttacacttcggctcgagctggggcttgtactctagctaatgctctatcgaaggagctaggagagtacaatatcccggtgttcgctatcgggccgaattacctacactcggaggattcgccgtacttctacccgactgagccgtggaagactaatccggagcacgtggctcacgtgaagaaggtgactgctctacaacgactagggactcaaaaagagttgggggaattggtggcatttttggcatctggctcttgtgattatttgactggccaggtgttttggttggcaggcggctttcccatgatagaacgttggcccggcatgcccgaataa

SEQ ID NO: 80 - protein, 254 aa, Artificial Sequence
  HHDH variant
MTTAIVTNVKHFGGMGSALRLSEAGHTVACHDESFKQKDELEAFAETYPQLKPMSEQEPAELIEAVTSAYGQVDILVSNDIFAPEFQPIDKYAVQDYRGAVEALQIRPFALVNAVASQMKKRKSGHIIFITSAAPFGPWKELSTYTSARAGACTLANALSKELGEYNIPVFAIGPNYLHSEDSPYFYPTEPWKTNPEHVAHVKKVTALQRLGTQKELGELVAFLASGSCDYLTGQVFWLAGGFPMIERWPGMPE

SEQ ID NO: 81 - DNA, 765 bp, Artificial Sequence
  HHDH variant
  CDS (1)..(765)
atgaccaccgctatcgtcaccaacgtcaaacattttggaggtatgggtagcgctctgaggctgagcgaagctggtcataccgtcgcttgccatgatgaaagctttaaacagaaagatgaactggaagcttttgctgaaacctacccacagctgaaaccaatgagcgaacaggaaccagctgaactgatcgaagctgtcaccagcgcttacggtcaggtcgatgtcctggtcagcaacgatatctttgctccagaatttcagccaatcgataaatacgctgtccaggattacaggggtgctgtcgaagctctgcagatcaggccatttgctctagtgaatgctgtggcttcgcaaatgaagaagcgaaagtcggggcacatcatcttcatcacttcggctgctccgttcgggccatggaaggagctatcgacttacacttcggctcgagctggggcttgttccctagctaatgctctatcgaaggagctaggagagtacaatatcccggtgttcgctatcgggccgaattacctacactcggaggattcgccgtacttctacccgactgagccgtggaagactaatccggagcacgtggctcacgtgaagaaggtgactgctctacaacgactagggactcaaaaagagttgggggaattggtggcatttttggcatctggctcttgtgattatttgactggccaggtgttttggttggcaggcggctttcccatgatagaacgttggcccggcatgcccgaataa

SEQ ID NO: 82 - protein, 254 aa, Artificial Sequence
  HHDH variant
MTTAIVTNVKHFGGMGSALRLSEAGHTVACHDESFKQKDELEAFAETYPQLKPMSEQEPAELIEAVTSAYGQVDVLVSNDIFAPEFQPIDKYAVQDYRGAVEALQIRPFALVNAVASQMKKRKSGHIIFITSAAPFGPWKELSTYTSARAGACSLANALSKELGEYNIPVFAIGPNYLHSEDSPYFYPTEPWKTNPEHVAHVKKVTALQRLGTQKELGELVAFLASGSCDYLTGQVFWLAGGFPMIERWPGMPE

SEQ ID NO: 83 - DNA, 765 bp, Artificial Sequence; identical to SEQ ID NO: 79
  HHDH variant
  CDS (1)..(765)

SEQ ID NO: 84 - protein, 254 aa, Artificial Sequence; identical to SEQ ID NO: 80
  HHDH variant

SEQ ID NO: 85 - DNA, 765 bp, Artificial Sequence
  HHDH variant
  CDS (1)..(765)
atgagcaccgctatcgtcaccaacgtcaaacattttggaggtatgggtagcgctctgaggctgagcgaagctggtcataccgtcgcttgccatgatgaaagctttaaacagaaagatgaactggaagcttttgctgaaacctacccacagctgaaaccaatgagcgaacaggaaccagctgaactgatcgaagctgtcaccagcgcttacggtcaggtcgatgtcctggtcagcaacgatatctttgcttcagaatttcagccaatcgataaatacgccgtcgaagattacaggggtgctgtcgaagctctgcagatcaggccatttgctctagtgaatgctgtggcttcgcaaatgaagaagcgaaagtcggggcacatcatcttcatcacttcggctactccgttcgggccatggaaggagctatcgacttacacttcggctcgagctggggcttgtactctagctaatgctctatcgaaggagctaggagagtacaatatcccggtgttcgctatcgggccgaattatctacactcggaggattcgccgtacttctacccgactgagccgtggaagactaatccggagcacgtggctcacgtgaagaaggtgactgctctacaacgactagggactcaaaaagagttgggggaattggtggcatttttggcatctggctcttgtgattatttgactggccaggtgttttggttggcaggcggctttcccatgatagaacgttggcccggcatgcccgaataa

SEQ ID NO: 86 - protein, 254 aa, Artificial Sequence
  HHDH variant
MSTAIVTNVKHFGGMGSALRLSEAGHTVACHDESFKQKDELEAFAETYPQLKPMSEQEPAELIEAVTSAYGQVDVLVSNDIFASEFQPIDKYAVEDYRGAVEALQIRPFALVNAVASQMKKRKSGHIIFITSATPFGPWKELSTYTSARAGACTLANALSKELGEYNIPVFAIGPNYLHSEDSPYFYPTEPWKTNPEHVAHVKKVTALQRLGTQKELGELVAFLASGSCDYLTGQVFWLAGGFPMIERWPGMPE

SEQ ID NO: 87 - DNA, 765 bp, Artificial Sequence
  HHDH variant
  CDS (1)..(765)
atgagcaccgctatcgtcaccaacgtcaagcattttggaggtatgggtagcgctctgaggctgagcgaagctggtcataccgtcgcttgccatgatgaaagctttaaacagaaagatgaactggaagcttttgctgaaacctacccacagctgaaaccaatgagcgaacaggaaccagctgaactgatcgaagctgtcaccagcgcttacggtcaggtcgatgtcctggtcagcaacgatatctttgctccagaatttcagccaatcgataaatacgctgtcgaagattacaggggtgctgtcgaagctctgcagatcaggccatttgctctagtgaatgctgtggcttcgcaaatgaagaagcgaaagtcggggcacatcatcttcatcacttcggctactccgttcgggccatggaaggagctatcgacttacacttcggctcgagctggggcttgtactctagctaatgctctatcgaaggagctaggagagtacaatatcccggtgttcgctatcgggccgaattacctacactcggaggattcgccgtactattatccgactgagccgtggaagactaatccggagcacgtggctcacgtgaagaaggtgactgctctacaacgactagggactcaaaaagagttgggggaattggtggcatttttggcatctggctcttgtgattatttgactggccaggtgttttggttggcaggcggctttcccatgatagaacgttggcccggcatgcccgaataa

SEQ ID NO: 88 - protein, 254 aa, Artificial Sequence
  HHDH variant
MSTAIVTNVKHFGGMGSALRLSEAGHTVACHDESFKQKDELEAFAETYPQLKPMSEQEPAELIEAVTSAYGQVDVLVSNDIFAPEFQPIDKYAVEDYRGAVEALQIRPFALVNAVASQMKKRKSGHIIFITSATPFGPWKELSTYTSARAGACTLANALSKELGEYNIPVFAIGPNYLHSEDSPYYYPTEPWKTNPEHVAHVKKVTALQRLGTQKELGELVAFLASGSCDYLTGQVFWLAGGFPMIERWPGMPE

SEQ ID NO: 89 - DNA, 765 bp, Artificial Sequence
  HHDH variant
  CDS (1)..(765)
atgagcaccgctatcgtcaccaacgtcaaacattttggaggtatgggtagcgctctgaggctgagcgaaggtggtcataccgtcgcttgccatgatgaaagctttaaacagaaagatgaactggaagcttttgctgaaacctacccacagctgaaaccaatgagcgaacaggaaccagctgaactgatcgaagctgtcaccagcgcttttggtcaggtcgatgtcctggtcagcaacgatatctttgctccagaatttcagccaatcgataaatacgctgtcgaagattacaggggtgctgtcgaagctctgcagatcaggccatttgctctagtgaatgctgtggcttcgcaaatgaagaagcgaaagtcggggcacatcatcttcatcacttcggctgccccgttcgggccatggaaggagctatcgacttacacttcggctcgagctggggctagtactctagctaatgctctatcgaaggagctaggagagtacaatatcccggtgttcgctatcgggccgaattacctacactcggaggattcgccgtacttctacccgactgagccgtggaagactaatccggagcacgtggctcacgtgaagaaggtgactgctctacaacgactagggactcaaaaagagttgggggaattggtggcatttttggcatctggctcttgtgattatttgactggccaggtgttttggttggcaggcggctttcccatgatagaacgttggcccggcatgcccgaataa

SEQ ID NO: 90 - protein, 254 aa, Artificial Sequence
  HHDH variant
MSTAIVTNVKHFGGMGSALRLSEGGHTVACHDESFKQKDELEAFAETYPQLKPMSEQEPAELIEAVTSAFGQVDVLVSNDIFAPEFQPIDKYAVEDYRGAVEALQIRPFALVNAVASQMKKRKSGHIIFITSAAPFGPWKELSTYTSARAGASTLANALSKELGEYNIPVFAIGPNYLHSEDSPYFYPTEPWKTNPEHVAHVKKVTALQRLGTQKELGELVAFLASGSCDYLTGQVFWLAGGFPMIERWPGMPE

SEQ ID NO: 91 - DNA, 765 bp, Artificial Sequence
  HHDH variant
  CDS (1)..(765)
atgagcaccgctatcgtcaccaacgtcaaacattttggaggtatgggtagcgctctgaggctgagcgaagctggtcataccgtcgcttgccatgatgaaagctttaaacagaaagatgaactggaagcttttgctgaaacctacccacagctgaaaccaatgagcgaacaggaaccagctgaactgatcgaagctgtcaccagcgcttttggtcaggtcgatgtcctggtcagcaacgatatctttgctccagaatttcagccaatcgataaatacgctgtcgaagattacaggggtgctgtcgaagctctgcagatcaggccatttgctctagtgaatgctgtggcttcgcaaatgaagaagcgaaagtcggggcacatcatcttcatcacttcggctgccccgttcgggccatggaaggagctatcgacttacacttcggctcgagctggggctagtactctagctaatgctctatcgaaggagctaggagagtacaatatcccggtgttcgctatcgggccgaattacctacactcggaggattcgccgtactattacccgactgagccgtggaagactaatccggagcacgtggctcacgtgaagaaggtgactgctctacaacgactagggactcaaaaagagttgggggaattggtggcatttttggcatctggctcttgtgattatttgactggccaggtgttttggttggcaggcggctttcccatgatagaacgttggcccggcatgcccgaataa

SEQ ID NO: 92 - protein, 254 aa, Artificial Sequence
  HHDH variant
MSTAIVTNVKHFGGMGSALRLSEAGHTVACHDESFKQKDELEAFAETYPQLKPMSEQEPAELIEAVTSAFGQVDVLVSNDIFAPEFQPIDKYAVEDYRGAVEALQIRPFALVNAVASQMKKRKSGHIIFITSAAPFGPWKELSTYTSARAGASTLANALSKELGEYNIPVFAIGPNYLHSEDSPYYYPTEPWKTNPEHVAHVKKVTALQRLGTQKELGELVAFLASGSCDYLTGQVFWLAGGFPMIERWPGMPE

SEQ ID NO: 93 - DNA, 765 bp, Artificial Sequence
  HHDH variant
  CDS (1)..(765)
atgagcaccgctatcgtcaccaacgtcaaacattttggaggtatgggtagcgctctgaggctgagcgaagctggtcataccgtcgcttgccatgatgaaagctttaaacagaaagatgaactggaagcttttgctgaaacctacccacagctgaaaccaatgagcgaacaggaaccagctgaactgatcgaagctgtcaccagcgcttttggtcaggtcgatgtcctggtcagcaacgatatctttgctctagaatttcagccaatcgataaatacgctgtcgaagattacaggggtgctgtcgaagctctgcagatcaggccatttgctctagtgaatgctgtggcttcgcaaatgaagaagcgaaagtcggggcacatcatcttcatcacttcggctgccccgttcgggccatggaaggagctatcgacttacacttcggctcgagctggggctagtactctagctaatgctctatcgaaggagctaggagagtacaatatcccggtgttcgctatcgggccgaattacctacactcggaggattcgccgtactattaccccactgagccgtggaagattaatccggagcacgtggctcacgtgaagaaggtgactgctctacaacgactagggactcaaaaagagttgggggaattggtggcatttttggcatctggctcttgtgattatttgactggccaggtgttttggttggcaggcggctttcccacgatagaacgttggcccggcatgcccgaataa

SEQ ID NO: 94 - protein, 254 aa, Artificial Sequence
  HHDH variant
MSTAIVTNVKHFGGMGSALRLSEAGHTVACHDESFKQKDELEAFAETYPQLKPMSEQEPAELIEAVTSAFGQVDVLVSNDIFALEFQPIDKYAVEDYRGAVEALQIRPFALVNAVASQMKKRKSGHIIFITSAAPFGPWKELSTYTSARAGASTLANALSKELGEYNIPVFAIGPNYLHSEDSPYYYPTEPWKINPEHVAHVKKVTALQRLGTQKELGELVAFLASGSCDYLTGQVFWLAGGFPTIERWPGMPE

SEQ ID NO: 95 - DNA, 765 bp, Artificial Sequence
  HHDH variant
  CDS (1)..(765)
atgagcaccgctattgtcaccaacgtcaaacattttggaggtatgggtagcgctctgaggctgagcgaagctggtcataccgtcgcttgccatgatgaaagctttaaacagaaagatgaactggaagcttttgctgaaacctacccacagctgaaaccaatgagcgaacaggaaccagctgaactgattgaagctgtcaccagcgcttttggtcaggtcgatgtcctggtcagcaacgatatctttgctctagaatttcagccaatcgataaatacgctgtcgaagattacaggggtgctgtcgaagctctgcagatcaggccatttgctctagtgaatgctgtggcttcgcaaatgaagaagcgaaagtcggggcacatcatcttcatcacttcggctgccccgttcgggccatggaaggagctatcgacttacacttcggctcgagctggggctagtactctagctaatgctctatcgaaggagctaggagagtacaatatcccggtgttcgctatcgggccgaattacctacactcggaggattcgccgtactattaccccactgagccgtggaagattaatccggagcacgtggctcacgtgaagaaggtgactgctctacaacgactagggactcaaaaagagttgggggaattggtggcatttttggcatctggctcttgtgattatttgactggccaggtgttttggttggcaggcggctttcccacgatagaacgttggcccggcatgcccgaataa

SEQ ID NO: 96 - protein, 254 aa, Artificial Sequence; identical to SEQ ID NO: 94
  HHDH variant

SEQ ID NO: 97 - DNA, 765 bp, Artificial Sequence
  HHDH variant
  CDS (1)..(765)
atgagcaccgctatcgtcaccaacgtcaaacattttggaggtatgggtagcgctctgaggctgagcgaagctggtcataccgtcgcttgccatgatgaaagctttaagcataaagatgaactggaagcttttgctgaaacctacccacagctgaaaccaatgagcgaacaggaaccagctgaactgatcgaagctgtcaccagcgcttttggtcaggtcgatgtcctggtcagcaacgatatctttgctctagaatttcggccaatcgataaatacgctgtcgaggattacaggggtgctgtcgaagctctgcagatcaggccatttgctctagtgaatgctgtggcttcgcaaatgaagaagcgaaagtcggggcacatcatcttcatcacttcggctgccccgttcgggccatggaaggagctatcgacttactcttcggctcgagctggggctagtgcactagctaatgctctatcgaaggagctaggagagtacaatatcccggtgttcgctatcgggccgaattacctacactcggaggattcgccgtactattaccccactgagccgtggaagattaatccggagcacgtggctcacgtgaagaaggtgactgctctacaacgactagggactcaaaaagagttgggggaattggtggcatttttggcatctggctcttgtgattatttgactggccaggtgttttggttggcaggcggctttcccgtcatagaacgttggcccggcatgcccgaataa

SEQ ID NO: 98 - protein, 254 aa, Artificial Sequence
  HHDH variant
MSTAIVTNVKHFGGMGSALRLSEAGHTVACHDESFKHKDELEAFAETYPQLKPMSEQEPAELIEAVTSAFGQVDVLVSNDIFALEFRPIDKYAVEDYRGAVEALQIRPFALVNAVASQMKKRKSGHIIFITSAAPFGPWKELSTYSSARAGASALANALSKELGEYNIPVFAIGPNYLHSEDSPYYYPTEPWKINPEHVAHVKKVTALQRLGTQKELGELVAFLASGSCDYLTGQVFWLAGGFPVIERWPGMPE

SEQ ID NO: 99 - DNA, 765 bp, Artificial Sequence
  HHDH variant
  CDS (1)..(765)
atgagcaccgctattgtcaccaacgtcaaacattttggaggtatgggtagcgctctgaggctgagcgaagctggtcataccgtcgcttgccatgatgaaagctttaagcataaagatgaactggaagcttttgctgaaacctacccacagctgaaaccaatgagcgaacaggaaccagctgaactgattgaagctgtcaccagcgcttttggtcaggtcgatgtcctggtcagcaacgatatctttgctctagaatttcggccaatcgataaatacgctgtcgaggattacaggggtgctgtcgaagctctgcagatcaggccatttgctctagtgaatgctgtggcttcgcaaatgaagaagcgaaagtcggggcacatcatcttcatcacttcggctgccccgttcgggccatggaaggagctatcgacttactcttcggctcgagctggggctagtgcactagctaatgctctatcgaaggagctaggagagtacaatatcccggtgttcgctatcgggccgaattacctacactcggaggattcgccgtactattaccccactgagccgtggaagattaatccggagcacgtggctcacgtgaagaaggtgactgctctacaacgactagggactcaaaaagagttgggggaattggtggcatttttggcatctggctcttgtgattatttgactggccaggtgttttggttggcaggcggctttcccgtcatagaacgttggcccggcatgcccgaataa

SEQ ID NO: 100 - protein, 254 aa, Artificial Sequence; identical to SEQ ID NO: 98
  HHDH variant

SEQ ID NO: 101 - DNA, 768 bp, Artificial Sequence
  HHDH variant
  CDS (1)..(768)
atgagcaccgctatcgtcaccaacgtcaaacattttggtggtatgggtagcgctctgaggctgagcgaagctggtcataccgtctcttgccatgatgaaagctttaaacagaaagatgaactggaagcttttgctgaaacctacccacagctgagaccaatgagcgaacaggaaccagctgaactgatcgaagctgtcaccagcgcttacggtcaggtcgatgtcctggtcagcaacgatatctttgctccagaatttcggccaatcgataaatacgctgtccaaaattacaggcgagctgtcgaagctctgcagatcatgccatttgctgtagagaatgctgtgacttcgcaaatgaagaagcgaaagtcggggcacatcatcttcatcacttccgctactccgttcgggccgtggaaggagctatcgacttacacttcggctcgagctggggcttgtactctagctaatgctctatcgaaggagctaggagagtacaatatcccggtgttcgctatcgggccgaattacctacactcggaggattcgccgtacttctacccgactgagccgtggaagactaatccggagcacgtggctcacgtgaagaaggtgactgctctacaacgactagggactcaaaaagagttgggggaattggtggcatttttggcatctggctcttgtgattatttgactggccaggtgttttggttggcaggcggctttcccatgatagaacgttggcccggcatgcccgaataatga

SEQ ID NO: 102 - protein, 254 aa, Artificial Sequence
  HHDH variant
MSTAIVTNVKHFGGMGSALRLSEAGHTVSCHDESFKQKDELEAFAETYPQLRPMSEQEPAELIEAVTSAYGQVDVLVSNDIFAPEFRPIDKYAVQNYRRAVEALQIMPFAVENAVTSQMKKRKSGHIIFITSATPFGPWKELSTYTSARAGACTLANALSKELGEYNIPVFAIGPNYLHSEDSPYFYPTEPWKTNPEHVAHVKKVTALQRLGTQKELGELVAFLASGSCDYLTGQVFWLAGGFPMIERWPGMPE

SEQ ID NO: 103 - DNA, 768 bp, Artificial Sequence
  HHDH variant
  CDS (1)..(768)
atgatcaccgcggccaacactaacttcaaactgaggggtggtatgggtagcgttccgaggctgagcgaagctggtcataccgtcgcttgccatgatgaaagctttaaacagaaagatgaactggaagcttttgctgaaacctacccacagctgaaaccaatgagcgaacaggaaccagctgaactgatcgaagctgtcaccagcgcttacggtcaggtcgatgtcctggtcagcaacgatatctttgctccagaatttcagccaatcgataaatacgctgtcgaagattacaggggtgctgtcgaagctctgcagatcaggccatttgctctagtgaatgctgtggcttcgcaaatgaagaagcgtaagacgggtcacatcatcttcatcacttcggctactccgttcgggccgtggaaggagctatcgacttacacttcggctcgagctggggcttgtactctagctaatgctctatcgaaggagctaggagagtacaatatcccggtgttcgctatcgggccgaattacctacactcggaggattcgccgtacttctacccgactgagccgtggaagactaatccggagcacgtggctcacgtgaagaaggtgactgctctacaacgactagggactcaaaaagagttgggggaattggtggcatttttggcatctggctcttgtgattatttgactggccaggtgttttggttggcaggcggctttcccatgatagaacgttggcccggcatgcccgaataatga

SEQ ID NO: 104 - protein, 254 aa, Artificial Sequence
  HHDH variant
MITAANTNFKLRGGMGSVPRLSEAGHTVACHDESFKQKDELEAFAETYPQLKPMSEQEPAELIEAVTSAYGQVDVLVSNDIFAPEFQPIDKYAVEDYRGAVEALQIRPFALVNAVASQMKKRKTGHIIFITSATPFGPWKELSTYTSARAGACTLANALSKELGEYNIPVFAIGPNYLHSEDSPYFYPTEPWKTNPEHVAHVKKVTALQRLGTQKELGELVAFLASGSCDYLTGQVFWLAGGFPMIERWPGMPE

SEQ ID NO: 105 - DNA, 768 bp, Artificial Sequence
  HHDH variant
  CDS (1)..(768)
atgagcacagacatcgtcaccaacgtcaaacattttggaggtacgggtagcgctctgaggctgagcgaagctggtcataccgtcgcttgccatgatgaaagctttaaacagaaagatgaactggaagcttttgctgaaacctacccacagctgaaaccaatgagcgaacaggaaccagctgaactgatcgaagctgtcaccagcgcttacggtcaggtcgatgtcctggtcggcaacgatatctttgctccagaatttcagccaatcgataaatacgctgtcgaagattaccgtggtactgatgaagctctgcagatcaggccatttgctctagtgaatgctgtggcttcgcaaatgaagaagcgaaagtcggggcacatcatcttcatcacttcggctactccgttcgggccatggaaggagctatcgacttacacttcggctcgagctggggcttgtactctagctaatgctctatcgaaggagctaggagagtacaatatcccggtgttcgctatcgggccgaattacctacactcggaggatagcccgtacttctacccgactgagccgtggaagactaatccggagcacgtggctcacgtgaagaaggtgactgctctacaacgactagggactcaaaaagagttgggggaattggtggcatttttggcatctggctctcgtgattatctgactgtgcaggtggtgtggctgccgggcggctttccgatgatagaacgttggcccggcatgcccgaataatga

SEQ ID NO: 106 - protein, 254 aa, Artificial Sequence
  HHDH variant
MSTDIVTNVKHFGGTGSALRLSEAGHTVACHDESFKQKDELEAFAETYPQLKPMSEQEPAELIEAVTSAYGQVDVLVGNDIFAPEFQPIDKYAVEDYRGTDEALQIRPFALVNAVASQMKKRKSGHIIFITSATPFGPWKELSTYTSARAGACTLANALSKELGEYNIPVFAIGPNYLHSEDSPYFYPTEPWKTNPEHVAHVKKVTALQRLGTQKELGELVAFLASGSRDYLTVQVVWLPGGFPMIERWPGMPE

SEQ ID NO: 107 - DNA, 768 bp, Artificial Sequence
  HHDH variant
  CDS (1)..(768)
atgagcacggacggcgacaccacggtcaaacattttggaggtaaaggtagcgctctgaggctgagcgaagctggtcataccgtcgcttgccatgatgaaagctttaaacacaaagatgatctggaagcttttgctgaaccgtacccacagctgaaaccaatgagcgaacaggaaccagctgaactgatcgaagctgtcaccagcgcttacggtcaggtcgatgtcctggtcagcaacgatatctttgctccagaatttcagccaatcgataaatacgctgtccagaactaccgtggtgctgtcgaagctctgcagatcaggccatttgctctagtgaatgctgtggcttcgcaaatgaagaagcgaaagtcggggcacatcatcttcatcacttcggctactccgttcgggccatggaaggagctatcgacttacacttcggctcgagctggggcttgtactctagctaatgctctatcgaaggagctaggagagtacaatatcccggtgttcgctatcgggccgaattacctacactcggaggattcgccgtacttctacccgactgagccgtggaagactaatccggagcacgtggctcacgtgaagaaggtgactgctctacaacgactagggactcagaaagagttgggggaattggtggcatttttggcatctggctcttgtgattatctgactgtgcaggtggtgtggctgaccggcgggtttccgatgatagaacgttggcccggcatgcccgaataatga

SEQ ID NO: 108 - protein, 254 aa, Artificial Sequence
  HHDH variant
MSTDGDTTVKHFGGKGSALRLSEAGHTVACHDESFKHKDDLEAFAEPYPQLKPMSEQEPAELIEAVTSAYGQVDVLVSNDIFAPEFQPIDKYAVQNYRGAVEALQIRPFALVNAVASQMKKRKSGHIIFITSATPFGPWKELSTYTSARAGACTLANALSKELGEYNIPVFAIGPNYLHSEDSPYFYPTEPWKTNPEHVAHVKKVTALQRLGTQKELGELVAFLASGSCDYLTVQVVWLTGGFPMIERWPGMPE

SEQ ID NO: 109 - DNA, 768 bp, Artificial Sequence
  HHDH variant
  CDS (1)..(768)
atgagcaccgcaatcgtcaccacggtcaaacattttggaggtatgggtaaccctgtgaggcttagggaagctggtcatagcgtcacttgccatgataaaagctttaaacagaaagctgaactggaagcttttgctgaaacctgcccacagctgaaaccaatgagcgaacaggaaccagctgaactgatcgaagctgtcaccagcgcttacggtcaggtcgatgtcctggtcagcaacgatatctttgctccagaatttcagccaatcgataaatacgctgtcgaagattacaggggtgctgtcgaagctctgcagatcaggccatttgctctagtgaatgctgtggcttcgcaaatgaagaagcgaaagtcggggcacatcatcttcatcacttcggctactccgttcgggccatggaaggagctatcgacttacacttcggctcgagctggggcttgtactctagctaatgctctatcgaaggagctaggagagtacaatatcccggtgttcgctatcgggccgaattacctacactcggaggatagcccgtgtttctacccgactgagccgtggaagactaatccggagcacgtggctcacgtgaagaaggtgactgctctacaacgactagggactcaaaaagagttgggggaattggtggcatttttggcatctggctcttgtgattatctgactgtgcaggtggtgtggctgaccggcggctttcccatgatagaacgttggccgggcatgcccgaataatga

SEQ ID NO: 110 - protein, 254 aa, Artificial Sequence
  HHDH variant
MSTAIVTTVKHFGGMGNPVRLREAGHSVTCHDKSFKQKAELEAFAETCPQLKPMSEQEPAELIEAVTSAYGQVDVLVSNDIFAPEFQPIDKYAVEDYRGAVEALQIRPFALVNAVASQMKKRKSGHIIFITSATPFGPWKELSTYTSARAGACTLANALSKELGEYNIPVFAIGPNYLHSEDSPCFYPTEPWKTNPEHVAHVKKVTALQRLGTQKELGELVAFLASGSCDYLTVQVVWLTGGFPMIERWPGMPE

SEQ ID NO: 111 - DNA, 768 bp, Artificial Sequence
  HHDH variant
  CDS (1)..(768)
atgagcaccgacatcgtcaccaacgtcaaacattttggaggtaaaggtagcgctctgaggctgagcgaagctggtctgagcgtcgcttgccatgatgaaagctttaaacagaaagatgaactggaagcttttgctgaaccgtacccacagctgaaaccaatgagcgaacaggaaccagctgaactgatcgaagctgtcaccagcgcttacggtcaggtcgatgtcctggtcagcaacgatatctttgctccagaatttcagccaatcgataaatacgctgtcgaagattaccgtggtgctgtcgaagctctgcagatcaggccatttgctctagtgaatgctgtggcttcgcaaatgaagaagcgaaagtcggggcacatcatcttcatcacttcggctactccgttcgggccatggaaggaactatcgacttacacttcggctcgagctggggcttgtactctagctaatgctctatcgaaggagctaggagagtacaatatcccggtgttcgctatcgggccgaattacctacactcggaggattcgccgtacttctacccgactgagccgtggaagactaatccggagcacgtggctcacgtgaagaaggtgactgctttacaacgactagggactcaaaaagagttgggggaattggtggcatttttggcatctggctcttgtgattatttgactggccaggtggtgtggctggcaggcggctttcccatgatagaacgtcggcccggcatgcccgaataatga

SEQ ID NO: 112 - protein, 254 aa, Artificial Sequence
  HHDH variant
MSTDIVTNVKHFGGKGSALRLSEAGLSVACHDESFKQKDELEAFAEPYPQLKPMSEQEPAELIEAVTSAYGQVDVLVSNDIFAPEFQPIDKYAVEDYRGAVEALQIRPFALVNAVASQMKKRKSGHIIFITSATPFGPWKELSTYTSARAGACTLANALSKELGEYNIPVFAIGPNYLHSEDSPYFYPTEPWKTNPEHVAHVKKVTALQRLGTQKELGELVAFLASGSCDYLTGQVVWLAGGFPMIERRPGMPE

SEQ ID NO: 113 - DNA, 768 bp, Artificial Sequence
  HHDH variant
  CDS (1)..(768)
atgagcaccgctatcgtcaccaacgtcaaacattttggaggtatgggtagcgctctgaggctgagcgaagctggtctgagcgtcgcttgccatgatgaaagctttaaacagaaagatgaactggaagcttttgctgaaacctacccacagctgaaaccaatgagcgaacaggaaccagctgaactgatcgaagctgtcaccagcgcttacggtcaggtcgatgtcctggtcagcaacgatatctttgctccagaatttcagccaatcgataaatacgctgtcgaagattacaggggtgctgatgaagctctgcagatcaggccatttgctctagtgaatgctgtggcttcgcaaatgaagaagcgaaagtcggggcacatcatcttcatcacttcggctactccgttcgggccatggaaggagctatcgacttacacttcggctcgagctggggcttgtactctagctaatgctctatcgaaggagctaggagagtacaatatcccgatgttcgctatcgggccgaattacctacactcggaggattcgccgtacttctacccgactgagccgtggaagactaatccggagcacgtggctcacgtgaagaaggtgactgctctacaacgactagggactcaaaaagagttgggggaattggtggcatttttggcatctggctcttgtgattatttgactggccaggtggtgtggttggcaggcggctttcccatgatagaacgttggcccggcatgcccgaataatga

SEQ ID NO: 114 - protein, 254 aa, Artificial Sequence
  HHDH variant
MSTAIVTNVKHFGGMGSALRLSEAGLSVACHDESFKQKDELEAFAETYPQLKPMSEQEPAELIEAVTSAYGQVDVLVSNDIFAPEFQPIDKYAVEDYRGADEALQIRPFALVNAVASQMKKRKSGHIIFITSATPFGPWKELSTYTSARAGACTLANALSKELGEYNIPMFAIGPNYLHSEDSPYFYPTEPWKTNPEHVAHVKKVTALQRLGTQKELGELVAFLASGSCDYLTGQVVWLAGGFPMIERWPGMPE

SEQ ID NO: 115 - DNA, 768 bp, Artificial Sequence
  HHDH variant
  CDS (1)..(768)
atgagcaccgtcatcgtcaccacggtcaaacattttggaggtatgggtagcgctctgaggctgagcgaagctggtcataccgtcgcttgccatgatgaaagctttaaacagaaagatgaactggaagcttttgctgaaccgtacccacagctgaaaccaatgagcgaacaggaaccagctgaactgatcgaagctgtcaccagcgcttacggtcaggtcgatgtcctggtcagcaacgatatctttgctccagaatttcagccaatcgataaatacgctgtcgaaaactacaggggtgctgatgaagctctgcagatcaggccatttgctctagtgaatgctgtggcttcgcaaatgaagaagcgaaagtcggggcgtatcatcttcatcacttcggctactccgctggggccatggaaggagctatcgacttacacttcggctcgagctggggcttgtactctagctaatgctctatcgaaggagctaggagagtacaatatcccggtgttcgctatcgggccgaattacctacactcggaggattcgccgtacttctactcgactgagccgtggaagactaatccggagcacgtggctcacgtgaagaaggtgactgctctacaacgactagggactcaaaaagagttgggggaattggtggcatttttggcatctggctcttgtgattatttgactgtgcaggtggtgtggttggcaggcggctttcccatgatagaacgttggcccggcatgcccgaataatga

SEQ ID NO: 116 - protein, 254 aa, Artificial Sequence
  HHDH variant
MSTVIVTTVKHFGGMGSALRLSEAGHTVACHDESFKQKDELEAFAEPYPQLKPMSEQEPAELIEAVTSAYGQVDVLVSNDIFAPEFQPIDKYAVENYRGADEALQIRPFALVNAVASQMKKRKSGRIIFITSATPLGPWKELSTYTSARAGACTLANALSKELGEYNIPVFAIGPNYLHSEDSPYFYSTEPWKTNPEHVAHVKKVTALQRLGTQKELGELVAFLASGSCDYLTVQVVWLAGGFPMIERWPGMPE

SEQ ID NO: 117 - DNA, 768 bp, Artificial Sequence
  HHDH variant
  CDS (1)..(768)
atgagcaccgctatcgtcaccaacgtcaaacattttggaggtatgggtaccgctctgaggctgagcgaagctggtcataccgtcgcttgccatgatgaaagctttaaacagaaagatgaactggaagcttttgctgaaacctacccacagctgaaaccaatgagcgaacaggaaccagctgaactgatcgaagctgtcaccagcgcttacggtcaggtcgatgtcctggtcagcaacgatatctttgctccagaatttcagccaatcaataaatacgctgtccaaaattacaggggtgctgtcgaagctctgcagatcaggccatttgctatagtgaatgctgtggcttcgcaaatgaagaagcgaaagtcggggcacatcatcttcatcacttcggctactccgttcgggccatggaaggagctatcgacttacacttcggctcgagctggggcttgtactctagctaatgctctatcgaaggagctaggagagtacaatatcccggtgttcgctatcgggccgaattacctacactcggaggattcgccgtacttctacccgactgagccgtggaagactaatccggagcacgtggctcacgtgaagaaggtgactgctctacaacgactagggactcaaaaagagttgggggaattggtggcatttttggcatctggctcttgtgattatttgactggccaggtgtgttggttggcaggcggctttcccatgatagaacgttggcccggcatgcccgaataatga

SEQ ID NO: 118 - protein, 254 aa, Artificial Sequence
  HHDH variant
MSTAIVTNVKHFGGMGTALRLSEAGHTVACHDESFKQKDELEAFAETYPQLKPMSEQEPAELIEAVTSAYGQVDVLVSNDIFAPEFQPINKYAVQNYRGAVEALQIRPFAIVNAVASQMKKRKSGHIIFITSATPFGPWKELSTYTSARAGACTLANALSKELGEYNIPVFAIGPNYLHSEDSPYFYPTEPWKTNPEHVAHVKKVTALQRLGTQKELGELVAFLASGSCDYLTGQVCWLAGGFPMIERWPGMPE

SEQ ID NO: 119 - DNA, 768 bp, Artificial Sequence
  HHDH variant
  CDS (1)..(768)
atgagcaccgctatcgtcaccaacgtcaaacattttggaggtatgggtagcgctctgaggctgagcgaagctggtctgaccgtcgcttgccatgatgaaagctttaaacagaaagatgatctggaagcttttgctgaaacctacccacagctgaaaccaatgagcgaacaggatccagctgacctgattgaagctgtcaccagcgcttacggtcaggtcgatgtcctggtcagcaacgatatctttgctccagaatttcagccaatcgataaatacgctgtcgaaaactacaggggtgctgtcgaagctctgcagatcaggccatttgctctagtgaatgctgtggcttcgcaaatgaagaagcgaaagtcggggcacatcatcttcatcacttcggctactccgttcgggccatggaaagagctatcgacttacacttcggctcgagctggggcttgtactctagctaatgctctatcgaaggagctaggagagtacaatatcccggtgttcgctatcgggccgaattacctacactcggaggattcgccgtacttctacccgactgagccgtggaagactaatccggagcacgtggctcacgtgaagaaggtgactgctctacaacgactagggactcaaaaagagttgggggaattggtggcatttttggcatctggctcttgtgattatttgactggccaggtgttttggttggcaggcggctttcccattatcgaacgttggcccggcatgcccgaataatga

SEQ ID NO: 120 - protein, 254 aa, Artificial Sequence
  HHDH variant
MSTAIVTNVKHFGGMGSALRLSEAGLTVACHDESFKQKDDLEAFAETYPQLKPMSEQDPADLIEAVTSAYGQVDVLVSNDIFAPEFQPIDKYAVENYRGAVEALQIRPFALVNAVASQMKKRKSGHIIFITSATPFGPWKELSTYTSARAGACTLANALSKELGEYNIPVFAIGPNYLHSEDSPYFYPTEPWKTNPEHVAHVKKVTALQRLGTQKELGELVAFLASGSCDYLTGQVFWLAGGFPIIERWPGMPE

SEQ ID NO: 121 - DNA, 768 bp, Artificial Sequence
  HHDH variant
  CDS (1)..(768)
atgagcaccgctatcgtcaccaacgtcaaacattttggaggtatgggtagcgctctgaggctgagcgaagctggtcataccgtcgcttgccatgatgaaagctttaaacagaaagatgatctggaagcttttgctgaaacctacccacagctgaaaccaatgagcgaacaggaaccagctgaactgatcgaagctgtcaccagcgcttacggtcaggtcgatgtcctggtcagcaacgatatctttgctccagaatttcagccaatcgataaatacgctgtcgaaaactacaggggtgctgtcgaagctctgcagatcaggccatttgctctagtgaatgctgtggcttcgcaaatgaagaaacgaaagtcggggcacatcatcttcatcacttcgtctactccgttcgggccatggaaagagctatcgacttacacttcggctcgagctggggcttgtactctagctaatgctctatcgaaggagctaggagagtacaatatcccggtgttcgctatcgggccgaattacctacactcggaggattcgccgtacttctacccgactgagccgtggaagactaatccggagcacgtggctcacgtgaagaaggtgactgctctacaacgactagggactcaaaaagagttgggggaattggtggcattcctggcatctggctcttgtgattatttgactggccaggtgttttggttggcaggcggctttcccctaatagaacgttggcccggcatgcccgaataatga

SEQ ID NO: 122 - protein, 254 aa, Artificial Sequence
  HHDH variant
MSTAIVTNVKHFGGMGSALRLSEAGHTVACHDESFKQKDDLEAFAETYPQLKPMSEQEPAELIEAVTSAYGQVDVLVSNDIFAPEFQPIDKYAVENYRGAVEALQIRPFALVNAVASQMKKRKSGHIIFITSSTPFGPWKELSTYTSARAGACTLANALSKELGEYNIPVFAIGPNYLHSEDSPYFYPTEPWKTNPEHVAHVKKVTALQRLGTQKELGELVAFLASGSCDYLTGQVFWLAGGFPLIERWPGMPE

SEQ ID NO: 123 - DNA, 768 bp, Artificial Sequence
  HHDH variant
  CDS (1)..(768)
atgagcaccgctatcgtcaccaacgtcaaacattttggaggtatgggtagcgctctgaggctgagcgaagctggtcataccgtcgcttgccatgatgaaagctttaaacagaaagatgatctggaagcttttgctgaaacctacccacagctgaaaccaatgagcgaacaggaaccagctgacctgattgaagctgtcaccagcgcttacggtcaggtcgatgtcctggtcagcaacgatatctttgctccagaatttcagccaatcgataaatacgctgtcgaaaactacaggggtgctgtcgaagctctgcagatcaggccatttgctctagtgaatgctgtggcttcgcaaatgaagaagcgaaagtcggggcacatcatcttcatcacttcggctactccgttcgggccatggaaagagctatcgacttacacttcggctcgagctggggcttgtactctagctaatgctctatcgaaggagctaggagagtacaatatcccggtgttcgctatcgggccgaattacctacactcggaggattcgccgtacttctacccgactgagccgtggaagactaatccggagcacgtggctcacgtgaagaaggtgactgctctacaacgactagggactcaaaaagagttgggggaattggtggcatttttggcatctggctcttgtgattatttgactggccaggtgttttggttggcaggcggctttcccattatcgaacgttggcccggcatgcccgaataatga

SEQ ID NO: 124 - protein, 254 aa, Artificial Sequence
  HHDH variant
MSTAIVTNVKHFGGMGSALRLSEAGHTVACHDESFKQKDDLEAFAETYPQLKPMSEQEPADLIEAVTSAYGQVDVLVSNDIFAPEFQPIDKYAVENYRGAVEALQIRPFALVNAVASQMKKRKSGHIIFITSATPFGPWKELSTYTSARAGACTLANALSKELGEYNIPVFAIGPNYLHSEDSPYFYPTEPWKTNPEHVAHVKKVTALQRLGTQKELGELVAFLASGSCDYLTGQVFWLAGGFPIIERWPGMPE

SEQ ID NO: 125 - DNA, 768 bp, Artificial Sequence; identical to SEQ ID NO: 123
  HHDH variant
  CDS (1)..(768)

SEQ ID NO: 126 - protein, 254 aa, Artificial Sequence; identical to SEQ ID NO: 124
  HHDH variant

SEQ ID NO: 127 - DNA, 768 bp, Artificial Sequence
  HHDH variant
  CDS (1)..(768)
atgagcaccgctatcgtcaccaacgtcaaacattttggaggtatgggtagcgctctgaggctgagcgaagctggtcataccgtcgcttgccatgatgaaagctttaaacagaaagatgaactggaagcttttgctgaaacctacccacagctgaaaccaatgagcgaacaggaaccagctgaactgatcgaagctgtcaccagcgcttacggtcaggtcgatgtcctggtcagcaacgatatctttgctccacaatttcagccagtcgaaaaatacgcagtcgaagattacaggggtgctgtcgaagctctgcagatcaggccatttgctctagtgaatgctgtggcttcgcaaatgaagaaacgaaagtcggggcacatcatcttcatcacttcggctactccgttcgggccatggaaggagctatcgacttacacttcggctcgagctggggcttgtactctagctaatgctctatcgaaggagctaggagagtacaatatcccggtgttcgctatcgggccgaattacctacactcggaggattcgccgtacttctacccgactgagccgtggaagactaatccggagcacgtggctcacgtgaagaaggtgactgctctacaacgactagggactcaaaaagagttgggggaattggtggcatttttggcatctggctcttgtgattatttgactggccaggtgttttggttggcaggcggctttcccatgatagaacgttggcccggcatgcccgaataatga

SEQ ID NO: 128 - protein, 254 aa, Artificial Sequence
  HHDH variant
MSTAIVTNVKHFGGMGSALRLSEAGHTVACHDESFKQKDELEAFAETYPQLKPMSEQEPAELIEAVTSAYGQVDVLVSNDIFAPQFQPVEKYAVEDYRGAVEALQIRPFALVNAVASQMKKRKSGHIIFITSATPFGPWKELSTYTSARAGACTLANALSKELGEYNIPVFAIGPNYLHSEDSPYFYPTEPWKTNPEHVAHVKKVTALQRLGTQKELGELVAFLASGSCDYLTGQVFWLAGGFPMIERWPGMPE

SEQ ID NO: 129 - DNA, 768 bp, Artificial Sequence
  HHDH variant
  CDS (1)..(768)
atgagcaccgctatcgtcaccaacgtcaaacattttggaggtatgggtagcgctctgaggctgagcgaagctggtcataccgtcgcttgccatgatgaaagctttaaacagaaagatgaactggaagcttttgctgaaacctacccacagctgaaaccaatgagcgaacaggaaccagctgaactgatcgaagctgtcaccagcgcttacggtcaggtcgatgtcctggtcagcaacgatatctttgctccacaatttcagccagtggacaaatactcagtcgaagattacaggggtgctgtcgaagctctgcagatcaggccatttgctctagtgaatgctgtggcttcgcaaatgaagaagcgaaagtcggggcacatcatcttcatcacttcggctactccgttcgggccatggaaggagctatcgacttacacttcggctcgagctggggcttgtactctagctaatgctctatcgaaggagctaggagagtacaatatcccggtgttcgctatcgggccgaattacctacactcggaggattcgccgtacttctacccgactgagccgtggaagactaatccggagcacgtggctcacgtgaagaaggtgactgctctacaacgactagggactcaaaaagagttgggggaattggtggcatttttggcatctggctcttgtgattatttgactggccaggtgttttggttggcaggcggctttcccatgatagaacgttggcccggcatgcccgaataatga

SEQ ID NO: 130 - protein, 254 aa, Artificial Sequence
  HHDH variant
MSTAIVTNVKHFGGMGSALRLSEAGHTVACHDESFKQKDELEAFAETYPQLKPMSEQEPAELIEAVTSAYGQVDVLVSNDIFAPQFQPVDKYSVEDYRGAVEALQIRPFALVNAVASQMKKRKSGHIIFITSATPFGPWKELSTYTSARAGACTLANALSKELGEYNIPVFAIGPNYLHSEDSPYFYPTEPWKTNPEHVAHVKKVTALQRLGTQKELGELVAFLASGSCDYLTGQVFWLAGGFPMIERWPGMPE

SEQ ID NO: 131 - DNA, 768 bp, Artificial Sequence
  HHDH variant
  CDS (1)..(768)
atgagcaccgctatcgtcaccaacgtcaaacattttggaggtatgggtagcgctctgaggctgagcgaagctggtcataccgtcgcttgccatgatgaaagctttaaacagaaagatgaactggaagcttttgctgaaacctacccacagctgaaaccaatgagcgaacaggaaccagctgaactgatcgaagctgtcaccagcgcttacggtcaggtcgatgtcctggtcagcaacgatatctttgctccacaatttcagccagtcgacaaatacgcagtcgaagattacaggggtgctgtcgaagctctgcagatcaggccatttgctctagtgaatgctgtggcttcgcaaatgaagaagcgaaagtcggggcacatcatcttcatcacttcggctactccgttagggccatggaaggagctatcgacttacacttcggctcgagctggggcttgtactctagctaatgctctatcgaaggagctaggagagtacaatatcccggtgttcgctatcgggccgaattacctacactcggaggattcgccgtacttctacccgactgagccgtggaagactaatccggagcacgtggctcacgtgaagaaggtgactgctctacaacgactagggactcaaaaagagttgggggaattggtggcatttttggcatctggctcttgtgattatttgactggccaggtgttttggttggcaggcggctttcccgtgatagaacgttggcctggcatgcccgaataatga

SEQ ID NO: 132 - protein, 254 aa, Artificial Sequence
  HHDH variant
MSTAIVTNVKHFGGMGSALRLSEAGHTVACHDESFKQKDELEAFAETYPQLKPMSEQEPAELIEAVTSAYGQVDVLVSNDIFAPQFQPVDKYAVEDYRGAVEALQIRPFALVNAVASQMKKRKSGHIIFITSATPLGPWKELSTYTSARAGACTLANALSKELGEYNIPVFAIGPNYLHSEDSPYFYPTEPWKTNPEHVAHVKKVTALQRLGTQKELGELVAFLASGSCDYLTGQVFWLAGGFPVIERWPGMPE

SEQ ID NO: 133 - DNA, 768 bp, Artificial Sequence
  HHDH variant
  CDS (1)..(768)
atgagcaccgctatcgtcaccaacgtcaaacattttggaggtatgggtagcgctctgaggctgagcgaagctggtcataccgtcgcttgccatgatgaaagctttaaacagaaagatgaactggaagcttttgctgaaacctacccacagctgaaaccaatgagcgaacaggatccagctgacctgatcgaagctgtcaccagcgcttttggtcaggtcgatgtcctggtcagcaacgatatctttgctccagaatttcagccaatcgataaatacgctgtccaagattacaggggtgctgtcgaagctctgcagatcaggccatttgctctagtgaatgctgtggcttcgcaaatgaagaagcgaaagtcggggcacatcatcttcatcacttcggctgctccgttcgggccatggaaggagctatcgacttacacttcggctcgagctggggctagtactctagctaatgctctatcgaaggagctaggagagtacaatatcccggtgttcgctatcgggccgaattacctacactcggaggattcgccgtacttctacccgactgagccgtggaagactaatccggagcacgtggctcacgtgaagaaggtgactgctctacaacgactagggactcaaaaagagttgggggaattggtggcatttttggcatctggctcttgtgattatttgactggccaggtgttttggttggcaggcggctttcccatgatagaacgttggcccggcatgcccgaataatga

SEQ ID NO: 134 - protein, 254 aa, Artificial Sequence
  HHDH variant
MSTAIVTNVKHFGGMGSALRLSEAGHTVACHDESFKQKDELEAFAETYPQLKPMSEQDPADLIEAVTSAFGQVDVLVSNDIFAPEFQPIDKYAVQDYRGAVEALQIRPFALVNAVASQMKKRKSGHIIFITSAAPFGPWKELSTYTSARAGASTLANALSKELGEYNIPVFAIGPNYLHSEDSPYFYPTEPWKTNPEHVAHVKKVTALQRLGTQKELGELVAFLASGSCDYLTGQVFWLAGGFPMIERWPGMPE

SEQ ID NO: 135 - DNA, 768 bp, Artificial Sequence
  HHDH variant
  CDS (1)..(768)
atgagcaccgctatcgtcaccaacgtcaaacattttggaggtatgggtagcgctctgaggctgagcgaagctggtcataccgtcgcttgccatgatgaaagctttaaacagaaagatgaactggaagcttttgctgaaacctacccacagctgaaaccaatgagcgaacaggaaccagctgaactgatcgaagctgtcaccagcgcttttggtcaggtcgatgtcctggtcagcaacgatatctttgctccagaatttcagccaatcgataaatacgctgtccaagattacaggggtgctgtcgaagctctgcagatcaggccatttgctctagtgaatgctgtggcttcgcaaatgaagaagcgaaagtcggggcacatcatcttcatcacttcggctgccccgttcgggccatggaaggagctatcgacttacacttcggctcgagctggggctagtactctagctaatgctctatcgaaggagctaggagagtacaatatcccggtgttcgctatcgggccgaattacctacactcggaggattcgccgtacttctacccgactgagccgtggaagactaatccggagcacgtggctcacgtgaagaaggtgactgctctacaacgactagggactcaaaaagagttgggggaattggtggcatttttggcatctggctcttgtgattatttgactggccaggtgttttggttggcaggcggctttcccatgatagaacgttggcccggcatgcccgaataatga

SEQ ID NO: 136 - protein, 254 aa, Artificial Sequence
  HHDH variant
MSTAIVTNVKHFGGMGSALRLSEAGHTVACHDESFKQKDELEAFAETYPQLKPMSEQEPAELIEAVTSAFGQVDVLVSNDIFAPEFQPIDKYAVQDYRGAVEALQIRPFALVNAVASQMKKRKSGHIIFITSAAPFGPWKELSTYTSARAGASTLANALSKELGEYNIPVFAIGPNYLHSEDSPYFYPTEPWKTNPEHVAHVKKVTALQRLGTQKELGELVAFLASGSCDYLTGQVFWLAGGFPMIERWPGMPE

SEQ ID NO: 137 - DNA, 768 bp, Artificial Sequence
  HHDH variant
  CDS (1)..(768)
atgagcgccgctatcgtcaccaacgtcaaacattttggaggtatgggtagcgctctgaggctgagcgaagctggtcataccgtcgcttgccatgatgaaagctttaaacagaaagatgaactggaagcttttgctgaaacctacccacagctgaaaccaatgagcgaacaggaaccagctgaactgatcgaagctgtcaccagcgcttacggtcaggtcgatgtcctggtcagcaacgatatctttgctccagaatttcagccaatcgataaatacgctgtccaagattacaggggtgctgtcgaagctctgcagatcaggccatttgctctagtgaatgctgtggcttcgcaaatgaagaagcgaaagtcggggcacatcatcttcatcacttcggctgccccgttcgggccatggaaggagctatcgacttacacttcggctcgagctggggcttgttccctagctaatgctctatcgaaggagctaggagagtacaatatcccggtgttcgctatcgggccgaattacctacactcggaggattcgccgtacttctacccgactgagccgtggaagactaatccggagcacgtggctcacgtgaagaaggtgactgctctacaacgactagggactcaaaaagagttgggggaattggtggcatttttggcatctggctcttgtgattatttgactggccaggtgttttggttggcaggcggctttcccatgatagaacgttggcccggcatgcccgaataatga

SEQ ID NO: 138 - protein, 254 aa, Artificial Sequence
  HHDH variant
MSAAIVTNVKHFGGMGSALRLSEAGHTVACHDESFKQKDELEAFAETYPQLKPMSEQEPAELIEAVTSAYGQVDVLVSNDIFAPEFQPIDKYAVQDYRGAVEALQIRPFALVNAVASQMKKRKSGHIIFITSAAPFGPWKELSTYTSARAGACSLANALSKELGEYNIPVFAIGPNYLHSEDSPYFYPTEPWKTNPEHVAHVKKVTALQRLGTQKELGELVAFLASGSCDYLTGQVFWLAGGFPMIERWPGMPE

SEQ ID NO: 139 - DNA, 768 bp, Artificial Sequence
  HHDH variant
  CDS (1)..(768)
atgagcaccgctatcgtcaccaacgtcaaacattttggaggtatgggtagcgctctgaggctgagcgaagctggtcataccgtcgcttgccatgatgaaagctttaaacagaaagatgaactggaagcttttgctgaaacctacccacagctgaaaccaatgagcgaacaggaaccagctgaactgatcgaagctgtcaccagcgcttttggtcaggtcgatgtcctggtcagcaacgatatctttgctccagaatttcagccaatcgataaatacgctgtccaagattacaggggtgctgtcgaagctctgcagatcaggccatttgctctagtgaatgctgtggcttcgcaaatgaagaagcgaaagtcggggcacatcatcttcatcacttcggctgccccgttcgggccatggaaggagctatcgacttacacttcggctcgagctggggctagtactctagctaatgctctatcgaaggagctaggagagtacaatatcccggtgttcgctatcgggccgaattacctacactcggaggattcgccgtacttctacccgactgagccgtggaagactaatccggagcacgtggctcacgtgaagaaggtgactgctctacaacgactagggactcaaaaagagttgggggaattggtggcatttttggcatctggctcttgtgattatttgactggccaggtgttttggttggcaggcggctttcccatgatagaacgttggcccggcatacccgaataatga

SEQ ID NO: 140 - protein, 254 aa, Artificial Sequence
  HHDH variant
MSTAIVTNVKHFGGMGSALRLSEAGHTVACHDESFKQKDELEAFAETYPQLKPMSEQEPAELIEAVTSAFGQVDVLVSNDIFAPEFQPIDKYAVQDYRGAVEALQIRPFALVNAVASQMKKRKSGHIIFITSAAPFGPWKELSTYTSARAGASTLANALSKELGEYNIPVFAIGPNYLHSEDSPYFYPTEPWKTNPEHVAHVKKVTALQRLGTQKELGELVAFLASGSCDYLTGQVFWLAGGFPMIERWPGIPE

SEQ ID NO: 141 - DNA, 768 bp, Artificial Sequence
  HHDH variant
  CDS (1)..(768)
atgagcaccgctatcgtcaccaacttcacacattttggaggtatgggtagcgctctgaggctgagcgaagctggtcataccgtcgcttgccatgatgaaagctttaaacagaaagatgaactggaagcttttgctgaaacctacccacagctgaaaccaatgagcgaacaggaaccagctgaactgatcgaagctgtcaccagcgcttttggtcaggtcgatgtcctggtcagcaacgatatctttgctccagaatttcagccaatcgataaatacgctgtcgaagattacaggggtgctgtcgaagctctgcagatcaggccatttgctctagtgaatgctgtggcttcgcaaatgaagaagcgaaagtcggggcacatcatcttcatcacttcggctgccccgttcgggccatggaaggagctatcgacttacacatcggctcgagctggggctagtactctagctaatgctctatcgaaggagctaggagagtacaatatcccggtgttcgctatcgggccgaattacctacactcggaggattcgccgtacttctacccgactgagccgtggaagactaatccggagcacgtggctcacgtgaagaaggtgactgctctacaacgactagggactcaaaaagagttgggggaattggtggcatttttggcatctggctcttgtgattatttgactggccaggtgttttggttggcaggcggctttcccatgatagaacgttggcccggcatgcccgaataatga

SEQ ID NO: 142 - protein, 254 aa, Artificial Sequence
  HHDH variant
MSTAIVTNFTHFGGMGSALRLSEAGHTVACHDESFKQKDELEAFAETYPQLKPMSEQEPAELIEAVTSAFGQVDVLVSNDIFAPEFQPIDKYAVEDYRGAVEALQIRPFALVNAVASQMKKRKSGHIIFITSAAPFGPWKELSTYTSARAGASTLANALSKELGEYNIPVFAIGPNYLHSEDSPYFYPTEPWKTNPEHVAHVKKVTALQRLGTQKELGELVAFLASGSCDYLTGQVFWLAGGFPMIERWPGMPE

SEQ ID NO: 143 - DNA, 768 bp, Artificial Sequence
  HHDH variant
  CDS (1)..(768)
atgagcaccgctatcgtcaccaacttcaaacattttggaggtatgggtagcgctctgaggctgagcgaagctggtcataccgtcgcttgccatgatgaaagctttaaacagaaagatgaactggaagcttttgctgaaacctacccacagctgaaaccaatgagcgaacaggaaccagctgaactgatcgaagctgtcaccagcgcttacggtcaggtcgatgtcctggtcatcaacgatatctttgctccagaatttcagccaatcgataaatacgctgtccaggattacaggggtgctgtcgaagctctgcagatcaggccatttgctctagtgaatgctgtggcttcgcaaatgaagaagcgaaagtcggggcacatcatcttcatcacttcggctaccccgttcgggccatggaaggagctatcgacttacacttcggctcgagctggggcttgtcccctagctaatgctctatcgaaggagctaggagagtacaatatcccggtgttcgctatcgggcctaattacctacactcggaggattcgccgtacttctacccgactgagccgtggaagactaatccggagcacgtggctcacgtgaagaaggtgactgctctacaacgactagggactcaaaaagagttgggggaattggtggcatttttggcatctggctcttgtgattatttgactgaccaggtgttttggttggcaggcggctttcccatgatagaacgttggcccggcatgcccgaataatga

SEQ ID NO: 144 - protein, 254 aa, Artificial Sequence
  HHDH variant
MSTAIVTNFKHFGGMGSALRLSEAGHTVACHDESFKQKDELEAFAETYPQLKPMSEQEPAELIEAVTSAYGQVDVLVINDIFAPEFQPIDKYAVQDYRGAVEALQIRPFALVNAVASQMKKRKSGHIIFITSATPFGPWKELSTYTSARAGACPLANALSKELGEYNIPVFAIGPNYLHSEDSPYFYPTEPWKTNPEHVAHVKKVTALQRLGTQKELGELVAFLASGSCDYLTDQVFWLAGGFPMIERWPGMPE

SEQ ID NO: 145 - DNA, 768 bp, Artificial Sequence
  HHDH variant
  CDS (1)..(768)
atgagcacggctatcgtgaccaacttcaaacattttggaggcatggacagcgctctgaggctgagcgaagctggtcataccgtcgcttgccatgatgaaagctttaaacagaaagatgaactggaagcttttgctgaaacctacccacagctgaaaccaatgagcgaacaagaaccatctgaactgatcgaagctgtcaccagcgcttttggtcaggtcgatgtcctggtcagcaacgatatctttgctccagaatttcagccaatcgataaatactctgtcgaagattacaggggtgctgtcgaagctctgcagatcaggccatttgccctagtgaatgctgcgactccccaaatgaagaagcgaaagtcggggcacattatcttcatcacttcggctgccccgttcgggccatggaaggagctatcgacttacacttcggctcgagctggggctagtactctagctaatgctctatcgaaggagctaggagagtacaatatcccggtgttcgctatcgggccgaattacctacactcggaggattcgccgtacttctacccgactgaaccgtggaagactaatccggagcacgtggctcacgtgaagaaggtgactgctctacaacgactagggactcaaaaagagttgggggaattggtggcatttttggcatctggctcttgtgattatttggctggccaggtgttttggttggcaggcggctttcccgtgatagaacgttggcccggcatgcccgaataatga

SEQ ID NO: 146 - protein, 254 aa, Artificial Sequence
  HHDH variant
MSTAIVTNFKHFGGMDSALRLSEAGHTVACHDESFKQKDELEAFAETYPQLKPMSEQEPSELIEAVTSAFGQVDVLVSNDIFAPEFQPIDKYSVEDYRGAVEALQIRPFALVNAATPQMKKRKSGHIIFITSAAPFGPWKELSTYTSARAGASTLANALSKELGEYNIPVFAIGPNYLHSEDSPYFYPTEPWKTNPEHVAHVKKVTALQRLGTQKELGELVAFLASGSCDYLAGQVFWLAGGFPVIERWPGMPE

SEQ ID NO: 147 - DNA, 768 bp, Artificial Sequence
  HHDH variant
  CDS (1)..(768)
atgagcaccgctatcgtcaccactttcaaacattttggaggtatgggtagcgttctcaggctgagcgaaggtggtcataccgtcgcttgccatgatgaaagctttaaacagaaagatgaactggaagcttttgctgaaacctacccacagctgaaaccaatgagcgaacaggaaccagctgaactgatcgaagctgtcaccagcgcttttggtcaggtcgatgtcctggtcagcaacgatatctttgctccagaatttcagccaatcgataaatacgctgtcgaagattacaggggtgctgtcgaagctctgcagatcaggccatttgctctagtgaatgctgtggcttcgcaaatgaagaagcgaaagtcggggcacatcatcttcatcacttcggctgccccgttcgggccatggaaggagctatcgacttacacttcggctcgagctggggctagtactctagctaatgctctatcgaaggagctaggagagtacaatatcccggtgttcgctatcgggccgaattacctacactcggaggattcgccgtacttctacccgactgagccgtggaagactaatccggagcacgtggctcacgtgaagaaggtgactgctctacaacgactagggactcaaaaagagttgggggaattggtggcatttttggcatctggctcttgtgattatttgactggccaggtgttttggttggcaggcggctttcccatgatagaacgttggcccggcatgcccgaataatga

SEQ ID NO: 148 - protein, 254 aa, Artificial Sequence
  HHDH variant
MSTAIVTTFKHFGGMGSVLRLSEGGHTVACHDESFKQKDELEAFAETYPQLKPMSEQEPAELIEAVTSAFGQVDVLVSNDIFAPEFQPIDKYAVEDYRGAVEALQIRPFALVNAVASQMKKRKSGHIIFITSAAPFGPWKELSTYTSARAGASTLANALSKELGEYNIPVFAIGPNYLHSEDSPYFYPTEPWKTNPEHVAHVKKVTALQRLGTQKELGELVAFLASGSCDYLTGQVFWLAGGFPMIERWPGMPE

SEQ ID NO: 149 - DNA, 768 bp, Artificial Sequence
  HHDH variant
  CDS (1)..(768)
atgagcaccgctattgtcaccaacgtcaaacattttggaggtatgggtagcgctctgaggctgagcgaagctggtcataccgtcgcttgccatgatgaaagctttaaacagaaagatgaactggaagcttttgctgaaacctacccacagctgaaaccaatgagcgaacaggaaccagctgaactgatcgaagctgtcaccagcgcttttggtcaggtcgatgtcctggtcagcaacgatatctttgctctagaatttcagccaatcgataaatacgctgtcgaagattacaggggtgctgtcgaagctctgcagatcaggccatttgctctagtgaatgctgtggctccgcaaatgaagaagcgaaagtcggggcacatcatcttcatcacttcggctgccccgttcgggccatggaaggagctatcgacttacacttcggctcgagctggggctagtactctagctaatgctctatcgaaggagctaggagagtacaatatcccggtgttcgctatcgggccgaattacctacactcggaggattcgccgtactattaccccactgagccgtggaagattaatccggagcacgtggctcacgtgaagaaggtgactgctctacaacgactagggactcaaaaagagttgggggaattggtggcatttttggcatctggctcttgtgattatttgactggccaggtgttttggttggcaggcggctttcccacgatagaacgttggcccggcatgcccgaataatga

SEQ ID NO: 150 - protein, 254 aa, Artificial Sequence
  HHDH variant
MSTAIVTNVKHFGGMGSALRLSEAGHTVACHDESFKQKDELEAFAETYPQLKPMSEQEPAELIEAVTSAFGQVDVLVSNDIFALEFQPIDKYAVEDYRGAVEALQIRPFALVNAVAPQMKKRKSGHIIFITSAAPFGPWKELSTYTSARAGASTLANALSKELGEYNIPVFAIGPNYLHSEDSPYYYPTEPWKINPEHVAHVKKVTALQRLGTQKELGELVAFLASGSCDYLTGQVFWLAGGFPTIERWPGMPE

SEQ ID NO: 151 - DNA, 768 bp, Artificial Sequence
  HHDH variant
  CDS (1)..(768)
atgagcaccgctattgtcaccaacgtcaaacattttggaggtatgggtagcgctctgaagctgagcgaagctggtcataccgtcgcttgccatgatgaaagctttaaacagaaagatgaactggaagcttttgctgaagcctacccacagctgaaaccaatgagcgaacaggaaccagctgaactgatcgaagctgtcaccagcgcttttggtcaggtcgatgtcctggtcagcaacgatatctttgctctagaatttcagccaatcgataaatacgctgtcgaagattacaggggtgctgtcgaagctctgcagatcaggccatttgctctagtgaatgctgtggcttcgcaaatgaagaagcgaaagtcggggcacatcatcttcatcacttcggctgccccgttcgggccatggaaggagctatcgacttacacttcggctcgagctggggctagtactctagctaatgctctatcgaaggagctaggagagtacaatatcccggtgttcgctatcgggccgaattacctacactcggaggattcgccgtactattaccccactgagccgtggaagataaatccggagcacgtggctcacgtgaagaaggtgactgctctacaacgactagggactcaaaaagagttgggggaattggtggcatttttggcatctggctcttgtgattatttgactggccaggtgttttggttggcaggcggctttcccacgatagaacgttggcccggcatgcccgaataatga

SEQ ID NO: 152 - protein, 254 aa, Artificial Sequence
  HHDH variant
MSTAIVTNVKHFGGMGSALKLSEAGHTVACHDESFKQKDELEAFAEAYPQLKPMSEQEPAELIEAVTSAFGQVDVLVSNDIFALEFQPIDKYAVEDYRGAVEALQIRPFALVNAVASQMKKRKSGHIIFITSAAPFGPWKELSTYTSARAGASTLANALSKELGEYNIPVFAIGPNYLHSEDSPYYYPTEPWKINPEHVAHVKKVTALQRLGTQKELGELVAFLASGSCDYLTGQVFWLAGGFPTIERWPGMPE

SEQ ID NO: 153 - DNA, 768 bp, Artificial Sequence
  HHDH variant
  CDS (1)..(768)
atgagcaccgctatcgtcaccaacgtcaaacattttggaggtatgggtagcgctctgaagctgagcgaagctggtcataccgtcgcttgccatgatgaaagctttaaacagaaagatgaactggaagcttttgctgaaacctttccacagctgaaaccaatgagcgaacaggaaccagctgaactgatcgaagctgtcaccagcgcttttggtcaggtcgatgtcctggtcagcaacgatatctttgctctagaatttcagccaatcgataaatacgctgtcgaagattacaggggtgctgtcgaagctctgcagatcaggccatttgctctagtgaatgctgtggcttcgcaaatgaagatgcgaaagtcggggcacatcatcttcatcacttcggctgccccgttcgggccatggaaggagctatcgacttacacttcggctcgagctggggctagtactctagctaatgctctatcgaaggagctaggagagtacaatatcccggtgttcgctatcgggccgaattacctacactcggaggattcgccgtactattaccccactgagccgtggaagattaatccggagcacgtggctcacgtgaagaaggtgactgctctacaacgactagggactcaaaaagagttgggggaattggtggcatttttggcatctggctcttgtgattatttgactggccaggtgttttggttggcaggcggctttcccacgatagaacgttggcccggcatgcccgaataatga

SEQ ID NO: 154 - protein, 254 aa, Artificial Sequence
  HHDH variant
MSTAIVTNVKHFGGMGSALKLSEAGHTVACHDESFKQKDELEAFAETFPQLKPMSEQEPAELIEAVTSAFGQVDVLVSNDIFALEFQPIDKYAVEDYRGAVEALQIRPFALVNAVASQMKMRKSGHIIFITSAAPFGPWKELSTYTSARAGASTLANALSKELGEYNIPVFAIGPNYLHSEDSPYYYPTEPWKINPEHVAHVKKVTALQRLGTQKELGELVAFLASGSCDYLTGQVFWLAGGFPTIERWPGMPE

SEQ ID NO: 155 - DNA, 768 bp, Artificial Sequence
  HHDH variant
  CDS (1)..(768)
atgagcaccgctatcgtcaccaacgtcaaacattttggaggtatgggtagcgctctgaggctgagcgaagctggtcataccgtcgcttgccatgatgaaagctttaaacagaaagatgaactggaagcttttgctgaaacctacccacagctgaaaccaatgagcgaacaggaaccagctgaactgatcgaagctgtcaccagcgcttttggtcaggtcgatgtcctggtcagcaacgatatctttgctctagaatttcggccaatcgataaatacgctgtcgaagattacaggggtgctgtcgaagctctgcagatcaaaccatttgctctagtgaactctgtggcttcccaaatgaagaagcgaaagtcggggcacatcatcttcatcacttcggctgccccgttcgggccatggaaggagctatcgacttactcttcggctcgagctggggctagtgcactagctaatgctctatcgaaggagctaggagagtacaatatcccggtgttcgctatcgggccgaattacctacactcggaggattcgccgtactattaccccactgagccgtggaagattaatccggagcacgtggctcacgtgaagaaggtgactgctctacaacgactcgggactcaaaaagagttgggggaattggtggcatttttggcatctggctcttgtgattatttgactggccaggtgttttggttggcaggcggctttcccacgatagaacgttggcccggcatgcccgaataatga

SEQ ID NO: 156 - protein, 254 aa, Artificial Sequence
  HHDH variant
MSTAIVTNVKHFGGMGSALRLSEAGHTVACHDESFKQKDELEAFAETYPQLKPMSEQEPAELIEAVTSAFGQVDVLVSNDIFALEFRPIDKYAVEDYRGAVEALQIKPFALVNSVASQMKKRKSGHIIFITSAAPFGPWKELSTYSSARAGASALANALSKELGEYNIPVFAIGPNYLHSEDSPYYYPTEPWKINPEHVAHVKKVTALQRLGTQKELGELVAFLASGSCDYLTGQVFWLAGGFPTIERWPGMPE

SEQ ID NO: 157 - DNA, 768 bp, Artificial Sequence
  HHDH variant
  CDS (1)..(768)
atgagcaccgctatcgtcaccaacgtcaaacattttggaggtatgggtagcgctctgaggctgagcgaagctggtcataccgtcgcttgccatgatgaaagctttaaacagaaagatgaactggaagcttttgctgaaacctacccacagctgaaaccaatgagcgaacaggaaccagctgaactgatcgaagctgtcaccagcgcttttggtcaggtcgatgtcctggtcagcaacgatatctttgctctagaatttcggccaatcgataaatacgctgtcgaagattacaggggtgctgtcgaagctctgcagatcaaaccatttgctctagtgaacgctgtggctccccaaatgaagaagcgaaagtcggggcacatcatcttcatcacttcggcttctccgttcgggccatggaaggagctatcgacttactcttcggctcgagctggggctagtactctagctaatgctctatcgaaggagctaggagagtacaatatcccggtgttcgctatcgggccgaattacctacactcggaggattcgccgtactattaccccactgagccgtggaagattgatccggagcacgtggctcacgtgaagaaggtgactgctctacaacgactagggactcaaaaagagttgggggaattggtggcatttttggcatctggctcttgtgattatttgactggccaggtgttttggttggcaggcggctttcccacgatagaacgttggcccggcatgcccgaataatga

SEQ ID NO: 158 - protein, 254 aa, Artificial Sequence
  HHDH variant
MSTAIVTNVKHFGGMGSALRLSEAGHTVACHDESFKQKDELEAFAETYPQLKPMSEQEPAELIEAVTSAFGQVDVLVSNDIFALEFRPIDKYAVEDYRGAVEALQIKPFALVNAVAPQMKKRKSGHIIFITSASPFGPWKELSTYSSARAGASTLANALSKELGEYNIPVFAIGPNYLHSEDSPYYYPTEPWKIDPEHVAHVKKVTALQRLGTQKELGELVAFLASGSCDYLTGQVFWLAGGFPTIERWPGMPE

SEQ ID NO: 159 - DNA, 768 bp, Artificial Sequence
  HHDH variant
  CDS (1)..(768)
atgagcaccgctatcgtcaccaacgtcaaacattttggaggtatgggtagcgctctgaggctgagcgaagctggtcataccgtcgcttgccatgatgaaagctttaaacagaaagatgaactggaagcttttgctgaaacctacccacagctgaaaccaatgagcgaacaggaaccagctgaactgatcgaagctgtcaccagcgcttttggtcaggtcgatgtcctggtcagcaacgatatctttgctctagaatttcggccaatcgataaatacgctgtcgaagattacaggggtgctgtcgaagctctgcagatcaaaccatttgctctagtgaatgctgtggcttcgcaaatgaagaagcgaaagtcggggcacatcatcttcatcacttcggcttctccgttcgggccatggaaggagctatcgacttactcttcggctcgagctggggctagtgcactagctaatgctctatcgaaggagctaggagagtacaatatcccggtgttcgctatcgggccgaattacctacactcggaggattcgccgtactattaccccactgagccgtggaagattgatccggagcacgtggctcacgtgaagaaggtgactgctctacaacgactagggactcaaaaagagttgggggaattggtggcatttttggcatctggctcttgtgattatttgactggccaggtgttttggttggcaggcggctttcccgtcatagaacgttggcccggcatgcccgaataatga

SEQ ID NO: 160 - protein, 254 aa, Artificial Sequence
  HHDH variant
MSTAIVTNVKHFGGMGSALRLSEAGHTVACHDESFKQKDELEAFAETYPQLKPMSEQEPAELIEAVTSAFGQVDVLVSNDIFALEFRPIDKYAVEDYRGAVEALQIKPFALVNAVASQMKKRKSGHIIFITSASPFGPWKELSTYSSARAGASALANALSKELGEYNIPVFAIGPNYLHSEDSPYYYPTEPWKIDPEHVAHVKKVTALQRLGTQKELGELVAFLASGSCDYLTGQVFWLAGGFPVIERWPGMPE

SEQ ID NO: 161 - DNA, 768 bp, Artificial Sequence
  HHDH variant
  CDS (1)..(768)
atgagcaccgctatcgtcaccaacgtcaaacattttggaggtatgggtagcgctctgaggctgagcgaagctggtcataccgtcgcttgccatgatgaaagctttaaacagaaagatgaactggaagcttttgctgaaacctacccacagctgaaaccaatgagcgaacaggaaccagctgaactgatcgaagctgtcaccagcgcttttggtcaggtcgatgtcctggtcagcaacgatatctttgctctagaatttcggccaatcgataaatacgctgtcgaagattacaggggtgctgtcgaagctctgcagatcaaaccatttgctctagtgaacgctgtggctcaccaaatgaagaggcgaaagtcggggcacatcatcttcatcacttcggctgccccgttcgggccatggaaggagctatcgacttacacttcggctcgagctggggctagtactctagctaatgctctatcgaaggagctaggagagtacaatatcccggtgttcgctatcgggccgaattacctacactcggaggattcgccgtactattaccccactgagccgtggaagattgatccggagcacgtggctcacgtgaagaaggtgactgctctacaacgactagggactcaaaaagagttgggggaattggtggcatttttggcatctggcccttgtgattatttgactggccaggtgttttggttggcaggcggctttcccacgatagaacgttggcccggcatgcccgaataatga

SEQ ID NO: 162 - protein, 254 aa, Artificial Sequence
  HHDH variant
MSTAIVTNVKHFGGMGSALRLSEAGHTVACHDESFKQKDELEAFAETYPQLKPMSEQEPAELIEAVTSAFGQVDVLVSNDIFALEFRPIDKYAVEDYRGAVEALQIKPFALVNAVAHQMKRRKSGHIIFITSAAPFGPWKELSTYTSARAGASTLANALSKELGEYNIPVFAIGPNYLHSEDSPYYYPTEPWKIDPEHVAHVKKVTALQRLGTQKELGELVAFLASGPCDYLTGQVFWLAGGFPTIERWPGMPE

SEQ ID NO: 163 - DNA, 768 bp, Artificial Sequence
  HHDH variant
  CDS (1)..(768)
atgagcactgcgattgttactaacgtcaaacatttcggtggtatggggagtgcgctgcgcctgtcggaggccggtcatacagtagcgtgtcacgatgaaagtttcaaacaaaaggacgaattggaagcctttgcggaaacttacccacagctgaaaccgatgtcagaacaggagccagcggagttaattgaggcggtcaccagtgccttcggccaggtggatgtcctggttagcaacgacatctttgctctggaattccgtccgattgacaagtatgccgtcgaagactaccgtggtgcggtagaagcactgcagatccgcccgttcgcgttggttaatgccgtagctagtcaaatgaaaaaacgtaaatcaggtcatattatcttcattactagcgcgagcccgtttggtccatggaaggagctgtcgacttatagtagtgcgcgcgccggggcctccaccttggctaacgcactgagtaaagaattaggtgagtataatatccctgttttcgccattgggccaaactatctgcactcagaagatagcccatactattacccaacggaaccgtggaagatcaaccctgaacatgtggcgcatgttaaaaaagtaacagccttacaacgtctgggtactcaaaaagaacttggcgagctggttgcgtttctcgcttctggtagctgcgattacttgaccggccaagtcttctggttagccggtggctttccgactattgagcgctggccaggtatgccggaataatga

SEQ ID NO: 164 - protein, 254 aa, Artificial Sequence
  HHDH variant
MSTAIVTNVKHFGGMGSALRLSEAGHTVACHDESFKQKDELEAFAETYPQLKPMSEQEPAELIEAVTSAFGQVDVLVSNDIFALEFRPIDKYAVEDYRGAVEALQIRPFALVNAVASQMKKRKSGHIIFITSASPFGPWKELSTYSSARAGASTLANALSKELGEYNIPVFAIGPNYLHSEDSPYYYPTEPWKINPEHVAHVKKVTALQRLGTQKELGELVAFLASGSCDYLTGQVFWLAGGFPTIERWPGMPE

SEQ ID NO: 165 - DNA, 768 bp, Artificial Sequence
  HHDH variant
  CDS (1)..(768)
atgagcactgcgattgttactaacgtcaaacatttcggtggtatggggagtgcgctgcgcctgtcggaggccggtcatacagtagcgtgtcacgatgaaagtttcaaacaaaaggacgaattggaagcctttgcggaaacttacccacagctgaaaccgatgtcagaacaggagccagcggagttaattgaggcggtcaccagtgccttcggccaggtggatgtcctggttagcaacgacatctttgctctggaattccgtccgattgacaagtatgccgtcgaagactaccgtggtgcggtagaagcactgcagatcaagccgttcgcgttggttaatgccgtagctagtcaaatgaaaaaacgtaaatcaggtcatattatcttcattactagcgcggctccgtttggtccatggaaggagctgtcgacttatagtagtgcgcgcgccggggcctccaccttggctaacgcactgagtaaagaattaggtgagtataatatccctgttttcgccattgggccaaactatctgcactcagaagatagcccatactattacccaacggaaccgtggaagatcaaccctgaacatgtggcgcatgttaaaaaagtaacagccttacaacgtctgggtactcaaaaagaacttggcgagctggttgcgtttctcgcttctggtagctgcgattacttgaccggccaagtcttctggttagccggtggctttccggtgattgagcgctggccaggtatgccggaataatga

SEQ ID NO: 166 - protein, 254 aa, Artificial Sequence
  HHDH variant
MSTAIVTNVKHFGGMGSALRLSEAGHTVACHDESFKQKDELEAFAETYPQLKPMSEQEPAELIEAVTSAFGQVDVLVSNDIFALEFRPIDKYAVEDYRGAVEALQIKPFALVNAVASQMKKRKSGHIIFITSAAPFGPWKELSTYSSARAGASTLANALSKELGEYNIPVFAIGPNYLHSEDSPYYYPTEPWKINPEHVAHVKKVTALQRLGTQKELGELVAFLASGSCDYLTGQVFWLAGGFPVIERWPGMPE

SEQ ID NO: 167 - DNA, 768 bp, Artificial Sequence
  HHDH variant
  CDS (1)..(768)
atgagcactgcgattgttactaacgttaaacatttcggtggtatggggagtgcgctgaaactgtcggaggccggtcatacagtagcgtgtcacgatgaaagtttcaaacaaaaggacgaattggaagcctttgcggaaacttacccacagctgaaaccgatgtcagaacaggagccagcggagttaattgaggcggtcaccagtgccttcggccaggtggatgtcctggttagcaacgacatctttgctctggaattccgtccgattgacaagtatgccgtcgaagactaccgtggtgcggtagaagcactgcagatccgcccgttcgcgttggttaatgccgtagctagtcaaatgaaaaaacgtaaatcaggtcatattatcttcattactagcgcggctccgtttggtccatggaaggagctgtcgacttatagtagtgcgcgcgccggggcctccaccttggctaacgcactgagtaaagaattaggtgagtataatatccctgttttcgccattgggccaaactatctgcactcagaagatagcccatactattacccaacggaaccgtggaagatcaaccctgaacatgtggcgcatgttaaaaaagtaacagccttacaacgtctgggtactcaaaaagaacttggcgagctggttgcgtttctcgcttctggtagctgcgattacttgaccggccaagtcttctggttagccggtggctttccggtgattgagcgctggccaggtatgccggaataatga

SEQ ID NO: 168 - protein, 254 aa, Artificial Sequence
  HHDH variant
MSTAIVTNVKHFGGMGSALKLSEAGHTVACHDESFKQKDELEAFAETYPQLKPMSEQEPAELIEAVTSAFGQVDVLVSNDIFALEFRPIDKYAVEDYRGAVEALQIRPFALVNAVASQMKKRKSGHIIFITSAAPFGPWKELSTYSSARAGASTLANALSKELGEYNIPVFAIGPNYLHSEDSPYYYPTEPWKINPEHVAHVKKVTALQRLGTQKELGELVAFLASGSCDYLTGQVFWLAGGFPVIERWPGMPE

SEQ ID NO: 169 - DNA, 768 bp, Artificial Sequence
  HHDH variant
  CDS (1)..(768)
atgagcactgcgattgttactaacgtcaaacatttcggtggtatggggagtgcgctgaaactgtcggaggccggtcatacagtagcgtgtcacgatgaaagtttcaaacaaaaggacgaattggaagcctttgcggaaacttacccacagctgaaaccgatgtcagaacaggagccagcggagttaattgaggcggtcaccagtgccttcggccaggtggatgtcctggttagcaacgacatctttgctctggaattccagccgattgacaagtatgccgtcgaagactaccgtggtgcggtagaagcactgcagatcaagccgttcgcgttggttaatgccgtagctagtcaaatgaaaaaacgtaaatcaggtcatattatcttcattactagcgcgagcccgtttggtccatggaaggagctgtcgacttatagtagtgcgcgcgccggggcctccgcgttggctaacgcactgagtaaagaattaggtgagtataatatccctgttttcgccattgggccaaactatctgcactcagaagatagcccatactattacccaacggaaccatggaagatccagcctgaacatgtggcgcatgttaaaaaagtaacagccttacaacgtctgggtactcaaaaagaacttggcgagctggttgcgtttctcgcttctggtagctgcgattacttgaccggccaagtcttctggttagccggtggctttccggtgattgagcgctggccaggtatgccggaataatga

SEQ ID NO: 170 - protein, 254 aa, Artificial Sequence
  HHDH variant
MSTAIVTNVKHFGGMGSALKLSEAGHTVACHDESFKQKDELEAFAETYPQLKPMSEQEPAELIEAVTSAFGQVDVLVSNDIFALEFQPIDKYAVEDYRGAVEALQIKPFALVNAVASQMKKRKSGHIIFITSASPFGPWKELSTYSSARAGASALANALSKELGEYNIPVFAIGPNYLHSEDSPYYYPTEPWKIQPEHVAHVKKVTALQRLGTQKELGELVAFLASGSCDYLTGQVFWLAGGFPVIERWPGMPE

SEQ ID NO: 171 - DNA, 768 bp, Artificial Sequence
  HHDH variant
  CDS (1)..(768)
atgagcactgcgattgttactaacgtcaaacatttcggtggtatggggagtgcgctgaaactgtcggaggccggtcatacagtagcgtgtcacgatgaaagtttcaaacaaaaggacgaattggaagcctttgcggaaacttacccacagctgaaaccgatgtcagaacaggagccagcggagttaattgaggcggtcaccagtgccttcggccaggtggatgtcctggttagcaacgacatctttgctctggaattccgtccgattgacaagtatgccgtcgaagactaccgtggtgcggtagaagcactgcagatcaagccgttcgcgttggttaatgccgtagctagtcaaatgaaaaaacgtaaatcaggtcatattatcttcattactagcgcggctccgtttggtccatggaaggagctgtcgacttatagtagtgcgcgcgccggggcctccgcgttggctaacgcactgagtaaagaattaggtgagtataatatccctgttttcgccattgggccaaactatctgcactcagaagatagcccatactattacccaacggaaccgtggaagatcaaccctgaacatgtggcgcatgttaaaaaagtaacagccttacaacgtctgggtactcaaaaagaacttggcgagctggttgcgtttctcgcttctggtagctgcgattacttgaccggccaagtcttctggttagccggtggctttccggtgattgagcgctggccaggtatgccggaataatga

SEQ ID NO: 172 - protein, 254 aa, Artificial Sequence
  HHDH variant
MSTAIVTNVKHFGGMGSALKLSEAGHTVACHDESFKQKDELEAFAETYPQLKPMSEQEPAELIEAVTSAFGQVDVLVSNDIFALEFRPIDKYAVEDYRGAVEALQIKPFALVNAVASQMKKRKSGHIIFITSAAPFGPWKELSTYSSARAGASALANALSKELGEYNIPVFAIGPNYLHSEDSPYYYPTEPWKINPEHVAHVKKVTALQRLGTQKELGELVAFLASGSCDYLTGQVFWLAGGFPVIERWPGMPE

SEQ ID NO: 173 - DNA, 768 bp, Artificial Sequence
  HHDH variant
  CDS (1)..(768)
atgagcaccgctatcgtcaccaacgtcaaacattttggaggtatgggtagcgctctgaggctgagcgaagctggtcataccgtcgcttgccatgatgaaagctttaaacagaaagatgaactggaagcttttgctgaaacctacccacagctgaaaccaatgagcgaacaggaaccagctgaactgatcgaagctgtcaccagcgcttttggtcaggtcgatgtcctggtcagcaacgatatctttgctctagaatttcggccaatcgataaatacgctgtcgaagattacaggggtgctgtcgaagctctgcagatcaaaccatttgctctagtgcactctgtggcttcccaaatgaagaagcgaaagtcggggcacatcatcttcatcacttcggctgccccgttcgggccatggaaggagctatcgacttactcttcggctcgagctggggctagtgcactagctaatgctctatcgaaggagctaggagagtacaatatcccggtgttcgctatcgggccgaattacctacactcggaggattcgccgtactattaccccactgagccgtggaagattgatccggagcacgtggctcacgtgaagaaggtgactgctctacaacgactagggactcaaaaagagttgggggaattggtggcatttttggcatctggctcttgtgattatttgactggccaggtgttttggttggcaggcggctttcccgtcatagaacgttggcccggcatgcccgaataatga

SEQ ID NO: 174 - protein, 254 aa, Artificial Sequence
  HHDH variant
MSTAIVTNVKHFGGMGSALRLSEAGHTVACHDESFKQKDELEAFAETYPQLKPMSEQEPAELIEAVTSAFGQVDVLVSNDIFALEFRPIDKYAVEDYRGAVEALQIKPFALVHSVASQMKKRKSGHIIFITSAAPFGPWKELSTYSSARAGASALANALSKELGEYNIPVFAIGPNYLHSEDSPYYYPTEPWKIDPEHVAHVKKVTALQRLGTQKELGELVAFLASGSCDYLTGQVFWLAGGFPVIERWPGMPE

SEQ ID NO: 175 - DNA, 768 bp, Artificial Sequence
  HHDH variant
  CDS (1)..(768)
atgagcaccgctatcgtcaccaacgtcaaacattttggaggtatgggtagcgctctgaggctgagcgaagctggtcataccgtcgcttgccatgatgaaagctttaaacagaaagatgaactggaagcttttgctgaaacctacccacagctgaaaccaatgagcgaacaggaaccagctgaactgatcgaagctgtcaccagcgcttttggtcaggtcgatgtcctggtcagcaacgatatctttgctctagaatttcagccaatcgataaatacgctgtcgaagattacaggggtgctgtcgaagctctgcagatcaggccatttgctctagtgaatgctgtggcttcgcaaatgaagaagcgaaagtcggggcacatcatcttcatcacttcggctgccgagactgggccatggaaggagctatcgacttacacttcggctcgagctggggctagtactctagctaatgctctatcgaaggagctaggagagtacaatatcccggtgttcgctatcgggccgaattacctacactcggaggattcgccgtactattaccccactgagccgtggaagattaatccggagcacgtggctcacgtgaagaaggtgactgctctacaacgactagggactcaaaaagagttgggggaattggtggcatttttggcatctggctcttgtgattatttgactggccaggtgttttggttggcaggcggctttcccacgatagaacgttggcccggcatgcccgaataatga

SEQ ID NO: 176 - protein, 254 aa, Artificial Sequence
  HHDH variant
MSTAIVTNVKHFGGMGSALRLSEAGHTVACHDESFKQKDELEAFAETYPQLKPMSEQEPAELIEAVTSAFGQVDVLVSNDIFALEFQPIDKYAVEDYRGAVEALQIRPFALVNAVASQMKKRKSGHIIFITSAAETGPWKELSTYTSARAGASTLANALSKELGEYNIPVFAIGPNYLHSEDSPYYYPTEPWKINPEHVAHVKKVTALQRLGTQKELGELVAFLASGSCDYLTGQVFWLAGGFPTIERWPGMPE

SEQ ID NO: 177 - DNA, 768 bp, Artificial Sequence
  HHDH variant
  CDS (1)..(768)
atgagcaccgctattgtcaccaacgtcaaacattttggaggtatgggtagcgctctgaggctgagcgaagctggtcataccgtcgcttgccatgatgaaagctttaagcataaagatgaactggaagcttttgctgaaacctacccacagctgaaaccaatgagcgaacaggaaccagctgaactgattgaagctgtcaccagcgcttttggtcaggtcgatgtcctggtcagcaacgatatctttgctctagaatttcggccaatcgataaatacgctgtcgaggattacaggggtgctgtcgaagctctgcagatccgcccatttgctctagtgaatgctgtggcttcgcaaatgaagaagcgaaagtcggggcacatcatcttcatcacttcggctgccccgttcgggccatggaaggagctatcgacttactcttcggctcgagctgggactagtgcactagctaatgctctagctaaggagctaggagagtacaatatcccggtgttcgctatcgggccgaattacctacactcggaggattcgccgttctattaccccactgagccgtggaagattaatccggagcacgtggctcacgtgaagaaggtgactgctctacaacgactagggactcaaaaagagttgggggaattggtggcatttttggcatctggctcttgtgattatttgactggccaggtgttttggttggcaggcggctttcccgtcatagaacgttggcccggcatgcccgaataatga

SEQ ID NO: 178 - protein, 254 aa, Artificial Sequence
  HHDH variant
MSTAIVTNVKHFGGMGSALRLSEAGHTVACHDESFKHKDELEAFAETYPQLKPMSEQEPAELIEAVTSAFGQVDVLVSNDIFALEFRPIDKYAVEDYRGAVEALQIRPFALVNAVASQMKKRKSGHIIFITSAAPFGPWKELSTYSSARAGTSALANALAKELGEYNIPVFAIGPNYLHSEDSPFYYPTEPWKINPEHVAHVKKVTALQRLGTQKELGELVAFLASGSCDYLTGQVFWLAGGFPVIERWPGMPE

SEQ ID NO: 179 - DNA, 768 bp, Artificial Sequence
  HHDH variant
  CDS (1)..(768)
atgagcaccgctattgtcaccaacgtcaaacattttggaggtatgggtagcgctctgaggctgagcgaagctggtcataccgtcgcttgccatgatgaaagctttaagcataaagatgaactggaagcttttgctgaagcctacccacagctgaaaccaatgagcgaacaggaaccagctgaactgattgaagctgtcaccagcgcttttggtcaggtcgatgtcctggtcagcaacgatatctttgctctagaatttcggccaatcgataaatacgctgtcgaggattacaggggtgctgtcgaagctctgcagatccgcccatttgctctagtgaatgctgtggcttcgcaaatgaagaagcgaaagtcggggcacatcatcttcatcacttcggctgccccgttcgggccatggaaggagctatcgacttactcttcggctcgagctgggactagtgcactagctaatgctctatcgaaggagctaggagagtacaatatcccggtgttcgctatcgggccgaattacctacactcggaggattcgccgtactattaccccactgagccgtggaagattaatccggagcacgtggctcacgtgaagaaggtgactgctctacaacgactagggactcaaaaagagttgggggaattggtggcatttttggcatctggctcttgtgattatttgactggccaggtgttttggttggcaggcggctttcccgctatagaacgttggcccggcatgcccgaataatga

SEQ ID NO: 180 - protein, 254 aa, Artificial Sequence
  HHDH variant
MSTAIVTNVKHFGGMGSALRLSEAGHTVACHDESFKHKDELEAFAEAYPQLKPMSEQEPAELIEAVTSAFGQVDVLVSNDIFALEFRPIDKYAVEDYRGAVEALQIRPFALVNAVASQMKKRKSGHIIFITSAAPFGPWKELSTYSSARAGTSALANALSKELGEYNIPVFAIGPNYLHSEDSPYYYPTEPWKINPEHVAHVKKVTALQRLGTQKELGELVAFLASGSCDYLTGQVFWLAGGFPAIERWPGMPE

SEQ ID NO: 181 - DNA, 768 bp, Artificial Sequence
  HHDH variant
  CDS (1)..(768)
atgagcaccgctattgtcaccaacgtcaaacattttggaggtatgggtagcgctctgaggctgagcgaagctggtcataccgtcgcttgccatgatgaaagctttaagcataaagatgaactggaagcttttgctgaagcctacccacagctgaaaccaatgagcgaacaggaaccagctgaactgattgaagctgtcaccagcgcttttggtcaggtcgatgtcctggtcagcaacgatatctttgctctagaatttcggccaatcgataaatacgctgtcgaggattacaggggtgctgtcgaagctctacagatccgcccatttgctctagtgaatgctgtggcttcgcaaatgaagaagcgaaagtcggggcacatcatcttcatcacttcggctgccccgttcgggccatggaaggagctatcgacttactcttcggctcgagctgggactagtgcactagctaatgctctagctaaggagctaggagagtacaatatcccggtgttcgctatcgggccgaattacctacactcggaggattcgccgttctattaccccactgagccgtggaagattaatccggagcacgtggctcacgtgaagaaggtgactgctctacaacgactagggactcaaaaagagttgggggaattggtggcatttttggcatctggctcttgtgattatttgactggccaggtgttttggttggcaggcggctttcccgctatagaacgttggcccggcatgcccgaataatga

SEQ ID NO: 182 - protein, 254 aa, Artificial Sequence
  HHDH variant
MSTAIVTNVKHFGGMGSALRLSEAGHTVACHDESFKHKDELEAFAEAYPQLKPMSEQEPAELIEAVTSAFGQVDVLVSNDIFALEFRPIDKYAVEDYRGAVEALQIRPFALVNAVASQMKKRKSGHIIFITSAAPFGPWKELSTYSSARAGTSALANALAKELGEYNIPVFAIGPNYLHSEDSPFYYPTEPWKINPEHVAHVKKVTALQRLGTQKELGELVAFLASGSCDYLTGQVFWLAGGFPAIERWPGMPE

SEQ ID NO: 183 - DNA, 768 bp, Artificial Sequence
  HHDH variant
  CDS (1)..(768)
atgagcaccgctattgtcaccaacgtcaaacattttggaggtatgggtagcgctctgaaactgagcgaagctggtcataccgtcgcttgccatgatgaaagctttaagcataaagatgaactggaagcttttgctgaagcctacccacagctgaaaccaatgagcgaacaggaaccagctgaactgattgaagctgtcaccagcgcttttggtcaggtcgatgtcctggtcagcaacgatatctttgctctagaatttcggccaatcgataaatacgctgtcgaggattacaggggtgctgtcgaagctctgcagatccgcccatttgctctagtgaatgctgtggcttcgcaaatgaagaagcgaaagtcggggcacatcatcttcatcacttcggctgccccgttcgggccatggaaggagctatcgacttactcttcggctcgagctgggactagtgcactagctaatgctctatcgaaggagctaggagagtacaatatcccggtgttcgctatcgggccgaattacctacactcggaggattcgccgttctattaccccactgagccgtggaagattaatccggagtatgtggctcacgtgaagaaggtgactgctctacgtcgactagggactcaaaaagagttgggggaattggtggcatttttggcatctggctcctgtgattatttgactggccaggtgttttggttggcaggcggctttcccgctatagaacgttggcccggcatgcccgaataatga

SEQ ID NO: 184 - protein, 254 aa, Artificial Sequence
  HHDH variant
MSTAIVTNVKHFGGMGSALKLSEAGHTVACHDESFKHKDELEAFAEAYPQLKPMSEQEPAELIEAVTSAFGQVDVLVSNDIFALEFRPIDKYAVEDYRGAVEALQIRPFALVNAVASQMKKRKSGHIIFITSAAPFGPWKELSTYSSARAGTSALANALSKELGEYNIPVFAIGPNYLHSEDSPFYYPTEPWKINPEYVAHVKKVTALRRLGTQKELGELVAFLASGSCDYLTGQVFWLAGGFPAIERWPGMPE

SEQ ID NO: 185 - DNA, 768 bp, Artificial Sequence
  HHDH
  CDS (1)..(768)
atgagcaccgctattgtcaccaacgtcaaacattttggaggtatgggtagcgctctgaggctgagcgaagctggtcataccgtcgcttgccatgatgaaagctttaagcataaagatgaactggaagcttttgctgaaacctacccacagctgaaaccaatgagcgaacaggaaccagctgaactgattgaagctgtcaccagcgcttttggtcaggtcgatgtcctggtcagcaacgatatctttgctctagaatttcggccaatcgataaatacgctgtcgaggattacaggggtgctgtcgaagctctgcagatcaggccatttgctctagtgaatgctgtggcttcgcaaatgaagaagcgaaagtcggggcacatcatcttcatcacttcggctgccccgttcgggccatggaaggagctatcgacttactcttcggctcgagctggggctagtgcactagctaatgctctatcgaaggagctaggagagtacaatatcccggtgttcgctatcgggccgaattacctacactcggaggattcgccgtactattaccccactgagccgtggaagattaatccggagtatgtggctcacgtgaagaaggtgactgctctacgtcgactagggactcaaaaagagttgggggaattggtggcatttttggcatctggctcttgtgattatttgactggccaggtgttttggttggcaggcggctttcccgctatagaacgttggcccggcatgcccgaataatga

SEQ ID NO: 186 - protein, 254 aa, Artificial Sequence
  HHDH
MSTAIVTNVKHFGGMGSALRLSEAGHTVACHDESFKHKDELEAFAETYPQLKPMSEQEPAELIEAVTSAFGQVDVLVSNDIFALEFRPIDKYAVEDYRGAVEALQIRPFALVNAVASQMKKRKSGHIIFITSAAPFGPWKELSTYSSARAGASALANALSKELGEYNIPVFAIGPNYLHSEDSPYYYPTEPWKINPEYVAHVKKVTALRRLGTQKELGELVAFLASGSCDYLTGQVFWLAGGFPAIERWPGMPE

SEQ ID NO: 187 - DNA, 768 bp, Artificial Sequence
  HHDH variant
  CDS (1)..(768)
atgagcaccgctattgtcaccaacgtcaaacattttggaggtatgggtagcgctctgaggctgagcgaagctggtcataccgtcgcttgccatgatgaaagctttaagcataaagatgaactggaagcttttgctgaagcctacccacagctgaaaccaatgagcgaacaggaaccagctgaactgattgaagctgtcaccagcgcttttggtcaggtcgatgtcctggtcagcaacgatatctttgctctagaatttcggccaatcgataaatacgctgtcgaggattacaggggtgctgtcgaagctctgcagatccgcccatttgctctagtgaatgctgtggcttcgcaaatgaagaagcgaaagtcggggcacatcatcttcatcacttcggctgccccgttcgggccatggaaggagctatcgacttactcttcggctcgagctgggactagtgcactagctaatgctctagctaaggagctaggagagtacaatatcccggtgttcgctatcgggccgaattacctacactcggaggattcgccgttctattaccccactgagccgtggaagattaatccggagcacgtggctcacgtgaagaaggtgactgctctacgtcgactagggactcaaaaagagttgggggaattggtggcatttttggcatctggctcttgtgattatttgactggccaggtgttttggttggcaggcggctttcccgtcatagaacgttggcccggcatgcccgaataatga

SEQ ID NO: 188 - protein, 254 aa, Artificial Sequence
  HHDH variant
MSTAIVTNVKHFGGMGSALRLSEAGHTVACHDESFKHKDELEAFAEAYPQLKPMSEQEPAELIEAVTSAFGQVDVLVSNDIFALEFRPIDKYAVEDYRGAVEALQIRPFALVNAVASQMKKRKSGHIIFITSAAPFGPWKELSTYSSARAGTSALANALAKELGEYNIPVFAIGPNYLHSEDSPFYYPTEPWKINPEHVAHVKKVTALRRLGTQKELGELVAFLASGSCDYLTGQVFWLAGGFPVIERWPGMPE

SEQ ID NO: 189 - DNA, 768 bp, Artificial Sequence
  HHDH variant
  CDS (1)..(768)
atgagcaccgctattgtcaccaacgtcaaacattttggaggtatgggtagcgctctgaggctgagcgaagctggtcataccgtcgcttgccatgatgaaagctttaagcataaagatgaactggaagcttttgctgaagcctacccacagctgaaaccaatgagcgaacaggaaccagctgaactgattgaagctgtcaccagcgcttttggtcaggtcgatgtcctggtcagcaacgatatctttgctctagaatttcggccaatcgataaatacgctgtcgaggattacaggggtgctgtcgaagctctgcagatcaggccatttgctctagtgaatgctgtggcttcgcaaatgaagaagcgaaagtcggggcacatcatcttcatcacttcggctgccccgttcgggccatggaaggagctatcgacttactcttcggctcgagctgggactagtgcactagctaatgctctagctaaggagctaggagagtacaatatcccggtgttcgctatcgggccgaattacctacactcggaggattcgccgtactattaccccactgagccgtggaagattaatccggagcacgtggctcacgtgaagaaggtgactgctctacaacgactagggactcaaaaagagttgggggaattggtggcatttttggcatctggctcttgtgattatttgactggccaggtgttttggttggcaggcggctttcccgctatagaacgttggcccggcatgcccgaataatga

SEQ ID NO: 190 - protein, 254 aa, Artificial Sequence
  HHDH variant
MSTAIVTNVKHFGGMGSALRLSEAGHTVACHDESFKHKDELEAFAEAYPQLKPMSEQEPAELIEAVTSAFGQVDVLVSNDIFALEFRPIDKYAVEDYRGAVEALQIRPFALVNAVASQMKKRKSGHIIFITSAAPFGPWKELSTYSSARAGTSALANALAKELGEYNIPVFAIGPNYLHSEDSPYYYPTEPWKINPEHVAHVKKVTALQRLGTQKELGELVAFLASGSCDYLTGQVFWLAGGFPAIERWPGMPE

SEQ ID NO: 191 - DNA, 768 bp, Artificial Sequence
  HHDH variant
  CDS (1)..(768)
atgagcaccgctattgtcaccaacgtcaaacattttggaggtatgggtagcgctctgaggctgagcgaagctggtcataccgtcgcttgccatgatgaaagctttaagcataaagatgaactggaagcttttgctgaagcctacccacagctgaaaccaatgagcgaacaggaaccagctgaactgattgaagctgtcaccagcgcttttggtcaggtcgatgtcctggtcagcaacgatatctttgctctagaatttcggccaatcgataaatacgctgtcgaggattacaggggtgctgtcgaagctctgcagatcaggccatttgctctagtgaatgctgtggcttcgcaaatgaagaagcgaaagtcggggcacatcatcttcatcacttcggctgccccgttcgggccatggaaggagctatcgacttactcttcggctcgagctgggactagtgcactagctaatgctctatcgaaggagctaggagagtacaatatcccggtgttcgctatcgggccgaattacctacactcggaggattcgccgttctattaccccactgagccgtggaagattaatccggagcacgtggctcacgtgaagaaggtgactgctctacaacgactagggactcaaaaagagttgggggaattggtggcatttttggcatctggctcttgtgattatttgactggccaggtgttttggttggcaggcggctttcccgctatagaacgttggcccggcatgcccgaataatga

SEQ ID NO: 192 - protein, 254 aa, Artificial Sequence
  HHDH variant
MSTAIVTNVKHFGGMGSALRLSEAGHTVACHDESFKHKDELEAFAEAYPQLKPMSEQEPAELIEAVTSAFGQVDVLVSNDIFALEFRPIDKYAVEDYRGAVEALQIRPFALVNAVASQMKKRKSGHIIFITSAAPFGPWKELSTYSSARAGTSALANALSKELGEYNIPVFAIGPNYLHSEDSPFYYPTEPWKINPEHVAHVKKVTALQRLGTQKELGELVAFLASGSCDYLTGQVFWLAGGFPAIERWPGMPE

SEQ ID NO: 193 - DNA, 768 bp, Artificial Sequence
  HHDH variant
  CDS (1)..(768)
atgagcaccgctattgtcaccaacgtcaaacattttggaggtatgggtagcgctctgaggctgagcgaagctggtcataccgtcgcttgccatgatgaaagctttaagcataaagatgaactggaagcttttgctgaaacctacccacagctgaaaccaatgagcgaacaggaaccagctgaactgattgaagctgtcaccagcgcttttggtcaggtcgatgtcctggtcagcaacgatatctttgctctagaatttcggccaatcgataaatacgctgtcgaggattacaggggtgctgtcgaagctctgcagatcaagccatttgctctagtgaatgctgtggcttcgcaaatgaagaagcgaaagtcggggcacatcatcttcatcacttcggctgccccgttcgggccatggaaggagctatcgacttactcttcggctcgagctgggactagtgcactagctaatgctctatcgaaggagctaggagagtacaatatcccggtgttcgctatcgggccgaattacctacactcggaggattcgccgtactattaccccactgagccgtggaagattaatccggagcacgtggctcacgtgaagaaggtgactgctctacaacgactagggactcaaaaagagttgggggaattggtggcatttttggcatctggctcttgtgattatttgactggccaggtgttttggttggcaggcggctttcccgctatagaacgttggcccggcatgcccgaataatga

SEQ ID NO: 194 - protein, 254 aa, Artificial Sequence
  HHDH variant
MSTAIVTNVKHFGGMGSALRLSEAGHTVACHDESFKHKDELEAFAETYPQLKPMSEQEPAELIEAVTSAFGQVDVLVSNDIFALEFRPIDKYAVEDYRGAVEALQIKPFALVNAVASQMKKRKSGHIIFITSAAPFGPWKELSTYSSARAGTSALANALSKELGEYNIPVFAIGPNYLHSEDSPYYYPTEPWKINPEHVAHVKKVTALQRLGTQKELGELVAFLASGSCDYLTGQVFWLAGGFPAIERWPGMPE

SEQ ID NO: 195 - DNA, 768 bp, Artificial Sequence
  HHDH variant
  CDS (1)..(768)
atgagcaccgctattgtcaccaacgtcaaacattttggaggtatgggtagcgctctgaggctgagcgaagctggtcataccgtcgcttgccatgatgaaagctttaagcataaagatgaactggaagcttttgctgaagcctacccacagctgaaaccaatgagcgaacaggaaccagctgaactgattgaagctgtcaccagcgcttttggtcaggtcgatgtcctggtcagcaacgatatctttgctctagaatttcggccaatcgataaatacgctgtcgaggattacaggggtgccgtcgaagctctgcagatcaagccatttgctctagtgaatgctgtggcttcgcaaatgaagaagcgaaagtcggggcacatcatcttcatcacttcggctgccccgttcgggccatggaaggagctatcgacttactcttcggctcgagctgggactagtgcactagctaatgctctatcgaaggagctaggagagtacaatatcccggtgttcgctatcgggccgaattacctacactcggaggattcgccgttctattaccccactgagccgtggaagattaatccggagcacgtggctcacgtgaagaaggtgactgctctacaacgactagggactcaaaaagagttgggggaattggtggcatttttggcatctggctcttgtgattatttgactggccaggtgttttggttggcaggcggctttcccgctatagaacgttggcccggcatgcccgaataatga

SEQ ID NO: 196 - protein, 254 aa, Artificial Sequence
  HHDH variant
MSTAIVTNVKHFGGMGSALRLSEAGHTVACHDESFKHKDELEAFAEAYPQLKPMSEQEPAELIEAVTSAFGQVDVLVSNDIFALEFRPIDKYAVEDYRGAVEALQIKPFALVNAVASQMKKRKSGHIIFITSAAPFGPWKELSTYSSARAGTSALANALSKELGEYNIPVFAIGPNYLHSEDSPFYYPTEPWKINPEHVAHVKKVTALQRLGTQKELGELVAFLASGSCDYLTGQVFWLAGGFPAIERWPGMPE

SEQ ID NO: 197 - DNA, 768 bp, Artificial Sequence
  HHDH variant
  CDS (1)..(768)
atgagcaccgctattgtcaccaacgtcaaacattttggaggtatgggtagcgctctgaggctgagcgaagctggtcataccgtcgcttgccatgatgaaagctttaagcataaagatgaactggaagcttttgctgaaacctacccacagctgaaaccaatgagcgaacaggaaccagctgaactgattgaagctgtcaccagcgcttttggtcaggtcgatgtcctggtcagcaacgatatctttgctctagaatttcggccaatcgataaatacgctgtcgaggattacaggggtgctgtcgaagctctgcagatcaggccatttgctctagtgaatgctgtggcttcgcaaatgaagaagcgaaagtcggggcacatcatcttcatcacttcggctgccccgttcgggccatggaaggagctatcgacttactcttcggctcgagctggggctagtgcactagctaatgctctatcgaaggagctaggagagtacaatatcccggtgttcgctatcgggccgaattacctacactcggaggattcgccgtactattaccccactgagccgtggaagattaatccggagcacgtggctcacgtgaagaaggtgactgctctacaacgactagggactcaaaaagagttgggggaattggtggcatttttggcatctggctcttgtgattatttgactggccaggtgttttggttggcaggcggctttcccgtcatagaacgttggcccggcatgctggaataatga

SEQ ID NO: 198 - protein, 254 aa, Artificial Sequence
  HHDH variant
MSTAIVTNVKHFGGMGSALRLSEAGHTVACHDESFKHKDELEAFAETYPQLKPMSEQEPAELIEAVTSAFGQVDVLVSNDIFALEFRPIDKYAVEDYRGAVEALQIRPFALVNAVASQMKKRKSGHIIFITSAAPFGPWKELSTYSSARAGASALANALSKELGEYNIPVFAIGPNYLHSEDSPYYYPTEPWKINPEHVAHVKKVTALQRLGTQKELGELVAFLASGSCDYLTGQVFWLAGGFPVIERWPGMLE

SEQ ID NO: 199 - DNA, 768 bp, Artificial Sequence
  HHDH variant
  CDS (1)..(768)
atgagcaccgctattgtcaccaacgtcaaacattttggaggtatgggtagcgctctgaggctgagcgaagctggtcataccgtcgcttgccatgatgaaagctttaagcataaagatgaactggaagcttttgctgaaacctacccacagctgaaaccaatgagcgaacaggaaccagctgaactgattgaagctgtcaccagcgcttttggtcaggtcgatgtcctggtcagcaacgatatctttgctctagaatttcggccaatcgataaatacgctgtcgaggattacaggggtgctgtcgaagctctgcagatcaggccatttgctctagtgaatgctgtggcttcgcaaatgaagaagcgaaagtcggggcacatcatcttcatcacttcggctgccccgttcgggccatggaaggagctatcgacttactcttcggctcgagctgggactagtgcactagctaatgctctatcgaaggagctaggagagtacaatatcccggtgttcgctatcgggccgaattacctacactcggaggattcgccgtactattaccccactgagccgtggaagattaatccggagcacgtggctcacgtgaagaaggtgactgctctacaacgactagggactcaaaaagagttgggggaattggtggcatttttggcatctggctcttgtgattatttgactggccaggtgttttggttggcaggcggctttcccgtcatagaacgttggcccggcatgcccgaataatga

SEQ ID NO: 200 - protein, 254 aa, Artificial Sequence
  HHDH variant
MSTAIVTNVKHFGGMGSALRLSEAGHTVACHDESFKHKDELEAFAETYPQLKPMSEQEPAELIEAVTSAFGQVDVLVSNDIFALEFRPIDKYAVEDYRGAVEALQIRPFALVNAVASQMKKRKSGHIIFITSAAPFGPWKELSTYSSARAGTSALANALSKELGEYNIPVFAIGPNYLHSEDSPYYYPTEPWKINPEHVAHVKKVTALQRLGTQKELGELVAFLASGSCDYLTGQVFWLAGGFPVIERWPGMPE

SEQ ID NO: 201 - DNA, 768 bp, Artificial Sequence
  HHDH variant
  CDS (1)..(768)
atgagcaccgctattgtcaccaacgtcaaacattttggaggtatgggtagcgctctgaggctgagcgaagctggtcataccgtcgcttgccatgatgaaagctttaagcataaagatgaactggaagcttttgctgaaacctacccacagctgaaaccaatgagcgaacaggaaccagctgaactgattgaagctgtcaccagcgcttttggtcaggtcgatgtcctggtcagcaacgatatctttgctctagaatttcggccaatcgataaatactcagtcgaggattacaggggtgctgtcgaagctctgcagatcaggccatttgctctagtgaatgctgtggcttcgcaaatgaagaagcgaaagtcggggcacatcatcttcatcacttcggctgccccgttcgggccatggaaggagctatcgacttactcttcggctcgagctggggctagtgcactagctaatgctctatcgaaggagctaggagagtacaatatcccggtgttcgctatcgggccgaattacctacactcggaggattcgccgtactattaccccactgagccgtggaagattaatccggagcacgtggctcacgtgaagaaggtgactgctctacaacgactagggactcaaaaagagttgggggaattggtggcatttttggcatctggctcttgtgattatttgactggccaggtgttttggttggcaggcggctttcccgtcatagaacgttggcccggcatgctggaataatga

SEQ ID NO: 202 - protein, 254 aa, Artificial Sequence
  HHDH variant
MSTAIVTNVKHFGGMGSALRLSEAGHTVACHDESFKHKDELEAFAETYPQLKPMSEQEPAELIEAVTSAFGQVDVLVSNDIFALEFRPIDKYSVEDYRGAVEALQIRPFALVNAVASQMKKRKSGHIIFITSAAPFGPWKELSTYSSARAGASALANALSKELGEYNIPVFAIGPNYLHSEDSPYYYPTEPWKINPEHVAHVKKVTALQRLGTQKELGELVAFLASGSCDYLTGQVFWLAGGFPVIERWPGMLE

SEQ ID NO: 203 - DNA, 768 bp, Artificial Sequence
  HHDH variant
  CDS (1)..(768)
atgagcaccgctattgtcaccaacgtcaaacattttggaggtatgggtagcgctctgaggctgagcgaagctggtcataccgtcgcttgccatgatgaaagctttaagcataaagatgaactggaagcttttgctgaaacctacccacagctgaaaccaatgagcgaacaggaaccagctgaactgattgaagctgtcaccagcgcttttggtcaggtcgatgtcttggtcagcaacgatatctttgctctagaatttcggccaatcgataaatacgctgtcgaggattacaggggtgctgtcgaagctctgcagatcaggccatttgctctagtgcatgctgtggcttcgcaaatgaagaagcgaaagtcggggcacatcatcttcatcacttcggctgccccgttcgggccatggaaggagctatcgacttactcttcggctcgagctggggctagtgcactagctaatgctctatcgaaggagctaggagagtacaatatcccggtgttcgctatcgggccgaattacctacactcggaggattcgccgtactattaccccactgagccgtggaagattaatccggagcacgtggctcacgtgaagaaggtgactgctctacaacgactagggactcaaaaagagttgggggaattggtggcatttttggcatctggctcttgtgattatttgactggccaggtgttttggttggcaggcggctttcccgtcatagaacgttggcccggcatgctggaataatga

SEQ ID NO: 204 - protein, 254 aa, Artificial Sequence
  HHDH variant
MSTAIVTNVKHFGGMGSALRLSEAGHTVACHDESFKHKDELEAFAETYPQLKPMSEQEPAELIEAVTSAFGQVDVLVSNDIFALEFRPIDKYAVEDYRGAVEALQIRPFALVHAVASQMKKRKSGHIIFITSAAPFGPWKELSTYSSARAGASALANALSKELGEYNIPVFAIGPNYLHSEDSPYYYPTEPWKINPEHVAHVKKVTALQRLGTQKELGELVAFLASGSCDYLTGQVFWLAGGFPVIERWPGMLE

SEQ ID NO: 205 - DNA, 768 bp, Artificial Sequence
  HHDH variant
  CDS (1)..(768)
atgagcaccgctattgtcaccaacgtcaaacattttggaggtatgggtagcgctctgaggctgagcgaagctggtcataccgtcgcttgccatgatgaaagctttaagcataaggatgaactggaagcttttgctgaaacctacccacagctgaaaccaatgagcgaacaggaaccagctgaactgattgaagctgtcaccagcgcttttggtcaggtcgatgtcctggtcagcaacgatatctttgctctagaatttcggccaatcgataaatacgctgtcgaggattacaggggtgctgtcgaagctctgcagatcaggccatttgctctagtgcattcggtggcttcgcaaatgaagaagcgaaagtcggggcacatcatcttcatcacttcggctgccccgttcgggccatggaaggagctatcgacttactcttcggctcgagctggggctagtgcactagctaatgctctatcgaaggagctaggagagtacaatatcccggtgttcgctatcgggccgaattacctacactcggaggattcgccgtactattaccccactgagccgtggaagattaatccggagcacgtggctcacgtgaagaaggtgactgctctacaacgactagggactcaaaaagagttgggggaattggtgacatttttggcatctggctcttgtgattatttgactggccaggtgttttggttggcaggcggctttcccgtcatagaacgttggcccggcatgcccgaataatga

SEQ ID NO: 206 - protein, 254 aa, Artificial Sequence
  HHDH variant
MSTAIVTNVKHFGGMGSALRLSEAGHTVACHDESFKHKDELEAFAETYPQLKPMSEQEPAELIEAVTSAFGQVDVLVSNDIFALEFRPIDKYAVEDYRGAVEALQIRPFALVHSVASQMKKRKSGHIIFITSAAPFGPWKELSTYSSARAGASALANALSKELGEYNIPVFAIGPNYLHSEDSPYYYPTEPWKINPEHVAHVKKVTALQRLGTQKELGELVTFLASGSCDYLTGQVFWLAGGFPVIERWPGMPE

SEQ ID NO: 207 - DNA, 768 bp, Artificial Sequence
  HHDH
  CDS (1)..(768)
atgagcaccgctattgtcaccaacgtcaaacattttggaggtatgggtagcgctctgaggctgagcgaagctggtcataccgtcgcttgccatgatgaaagctttaagcataaagatgaactggaagcttttgctgaaacctacccacagctgaaaccaatgagcgaacaggaaccagctgaactgattgaagctgtcaccagcgcttttggtcaggtcgatgtcctggtcagcaacgatatctttgctctagaatttcggccaatcgataaatactcagtcgaggattacaggggtgctgtcgaagctctgcagatcaggccatttgctctagtgaatgctgtggcttcgcaaatgaagaagcgaaagtcggggcacatcatcttcatcacttcggctgccccgttcgggccatggaaggagctatcgacttactcttcggctcgagctggggctagtgcactagctaatgctctatcgaaggagctaggagagtacaatatcccggtgttcgctatcgggccgaattacctacactcggaggattcgccgtactattaccccactgagccgtggaagattaatccggagcacgtggctcacgtgaagaaggtgactgctctacaacgactagggactcaaaaagagttgggggaattggtggcatttttggcatctggctcttgtgattatttgactggccaggtgttttggttggcaggcggctttcccgtcatagaacgtttgcccggcatgctggaataatga

SEQ ID NO: 208 - protein, 254 aa, Artificial Sequence
  HHDH
MSTAIVTNVKHFGGMGSALRLSEAGHTVACHDESFKHKDELEAFAETYPQLKPMSEQEPAELIEAVTSAFGQVDVLVSNDIFALEFRPIDKYSVEDYRGAVEALQIRPFALVNAVASQMKKRKSGHIIFITSAAPFGPWKELSTYSSARAGASALANALSKELGEYNIPVFAIGPNYLHSEDSPYYYPTEPWKINPEHVAHVKKVTALQRLGTQKELGELVAFLASGSCDYLTGQVFWLAGGFPVIERLPGMLE

SEQ ID NO: 209 - DNA, 768 bp, Artificial Sequence
  HHDH variant
  CDS (1)..(768)
atgagcaccgctattgtcaccaacgtcaaacattttggaggtatgggtagcgctctgaaactgagcgaagctggtcataccgtcgcttgccatgatgaaagctttaagcataaagatgaactggaagcttttgctgaaacctacccacagctgaaaccaatgagcgaacaggaaccagctgaactgattgaagctgtcaccagcgcttttggtcaggtcgatgtcctggtcagcaacgatatctttgctctagaatttcggccaatcgataaatacgctgtcgaggattacaggggtgctgtcgaagctctgcagatcaagccatttgctctagtgaatgctgtggcttcgcaaatgaagaagcgaaagtcggggcacatcatcttcatcacttcggctgccccgttcgggccatggaaggagctatcgacttactcttcggctcgagctgggactagtgcactagctaatgctctatcgaaggagctaggagagtacaatatcccggtgttcgctatcgggccgaattacctacactcggaggattcgccgttctattaccccactgagccgtggaagattaatccggagtatgtggctcacgtgaagaaggtgactgctctacgtcgactagggactcaaaaagagttgggggaattggtggcatttttggcatctggctcttgtgattatttgactggccaggtgttttggttggcaggcggctttcccgtcatagaacgttggcccggcatgcccgaataatga

SEQ ID NO: 210 - protein, 254 aa, Artificial Sequence
  HHDH variant
MSTAIVTNVKHFGGMGSALKLSEAGHTVACHDESFKHKDELEAFAETYPQLKPMSEQEPAELIEAVTSAFGQVDVLVSNDIFALEFRPIDKYAVEDYRGAVEALQIKPFALVNAVASQMKKRKSGHIIFITSAAPFGPWKELSTYSSARAGTSALANALSKELGEYNIPVFAIGPNYLHSEDSPFYYPTEPWKINPEYVAHVKKVTALRRLGTQKELGELVAFLASGSCDYLTGQVFWLAGGFPVIERWPGMPE

SEQ ID NO: 211 - DNA, 768 bp, Artificial Sequence
  HHDH variant
  CDS (1)..(768)
atgagcaccgctattgtcaccaacgtcaaacattttggaggtatgggtagcgctctgaaactgagcgaagctggtcataccgtcgcttgccatgatggtagctttaagcataaagatgaactggaagcttttgctgaagcctacccacagctgaaaccaatgagcgaacaggaaccagctgaactgattgaagctgtcaccagcgcttttggtcatgtcgatgtcctggtcagcaacgatatctttgctctagaatttcggccaatcgataaatacgctgtcgaggattacaggggtgctgtcgaagctctgcagatcaggccatttgctctagtgaatgctgtggcttcgcaaatgaagaagcgaaagtcggggcacatcatcttcatcacttcggctgccccgttcgggccatggaaggagctatcgacttactcttcggctcgagctgggactagtgcactagctaatgctctatcgaaggagctaggagagtacaatatcccggtgttcgctatcgggccgaattacctacactcggaggattcgccgtactattaccccactgagccgtggaagattaatccggagcacgtggctcacgtgaagaaggtgactgctctacgtcgactagggactcaaaaagagttgggggaattggtggcatttttggcatctggctcttgtgattatttgactggccaggtgttttggttggcaggcggctttcccgtcatagaacgttggcccggcatgcccgaataatga

SEQ ID NO: 212 - protein, 254 aa, Artificial Sequence
  HHDH variant
MSTAIVTNVKHFGGMGSALKLSEAGHTVACHDGSFKHKDELEAFAEAYPQLKPMSEQEPAELIEAVTSAFGHVDVLVSNDIFALEFRPIDKYAVEDYRGAVEALQIRPFALVNAVASQMKKRKSGHIIFITSAAPFGPWKELSTYSSARAGTSALANALSKELGEYNIPVFAIGPNYLHSEDSPYYYPTEPWKINPEHVAHVKKVTALRRLGTQKELGELVAFLASGSCDYLTGQVFWLAGGFPVIERWPGMPE

SEQ ID NO: 213 - DNA, 768 bp, Artificial Sequence
  HHDH variant
  CDS (1)..(768)
atgagcaccgctattgtcaccaacgtcaaacattttggaggtatgggcagcgctctgaggctgagcgaagctggtcataccgtcgcttgccatgatgaaagctttaagcataaagatgaactggaagcttttgctgaaacctacccacagctgaaaccaatgagcgaacaggaaccagctgaactgattgaagctgtcaccagcgcttttggtcaggtcgatgtcctggtcagcaacgatatctttgctctagaatttcggccaatcgataaatacgctgtcgaagattacaggggtgctgtcgaagctctgcagatcaagccatttgctctagtgcatgctgtggctccgcaaatgaagaagcgaaagtcggggcacatcatcttcatcacttcggctgccccgttcgggccatggaaggagctatcgacttactcttcggctcgagctggggctagtgcactagctaatgctctatcgaaggagctaggagagtacaatatcccggtgttcgctatcgggccgaattacctacactcggaggattcgccgtactattaccccactgagccgtggaagattaatccggagcatgtggctcacgtgaagaaggtgactgctctacaacgactagggactcaaaaagagttgggggaattggtggcatttttggcatctggctcttgtgattatttgactggccaggtgttttggttggcaggcggctttcccgtcatagaacgttggcccggcatgcccgaataatga

SEQ ID NO: 214 - protein, 254 aa, Artificial Sequence
  HHDH variant
MSTAIVTNVKHFGGMGSALRLSEAGHTVACHDESFKHKDELEAFAETYPQLKPMSEQEPAELIEAVTSAFGQVDVLVSNDIFALEFRPIDKYAVEDYRGAVEALQIKPFALVHAVAPQMKKRKSGHIIFITSAAPFGPWKELSTYSSARAGASALANALSKELGEYNIPVFAIGPNYLHSEDSPYYYPTEPWKINPEHVAHVKKVTALQRLGTQKELGELVAFLASGSCDYLTGQVFWLAGGFPVIERWPGMPE

SEQ ID NO: 215 - DNA, 768 bp, Artificial Sequence; identical to SEQ ID NO: 43
  HHDH variant
  CDS (1)..(768)

SEQ ID NO: 216 - protein, 254 aa, Artificial Sequence; identical to SEQ ID NO: 44
  HHDH variant

SEQ ID NO: 217 - DNA, 768 bp, Artificial Sequence
  HHDH variant
  CDS (1)..(768)
atgagcaccgctattgtcaccaacgtcaaacattttggaggtatgggtagcgctctgaggctgagcgaagctggtcataccgtcgcttgccatgatgaaagctttaagcataaagatgaactggaagcttttgctgaagcctacccacagctgaaaccaatgagcgaacaggaaccagctgaactgattgaagctgtcaccagcgcttttggtcaggtcgatgtcctggtcagcaacgatatctttgctctagaatttcggccaatcgataaatacgctgtcgaggattacaggggtgctgtcgaagctctgcagatcaagccatttgctctagtgaatgctgtggcttcgcaaatgaagaagcgaaagtcggggcacatcatcttcatcacttcggctgccccgttcgggccatggaaggagctatcgacttactcttcggctcgagctgggactagtgcactagctaatgctctagctaaggagctaggagagtacaatatcccggtgttcgctatcgggccgaattacctacactcggaggattcgccgttctattaccccactgagccgtggaagattaatccggagcacgtggctcacgtgaagaaggtgactgctctacaacgactagggactcaaaaagagttgggggaattggtggcatttttggcatctggctcttgtgattatttgactggccaggtgttttggttggcaggcggctttcccgtcatagaacgttggcccggcatgctggaataatga

SEQ ID NO: 218 - protein, 254 aa, Artificial Sequence
  HHDH variant
MSTAIVTNVKHFGGMGSALRLSEAGHTVACHDESFKHKDELEAFAEAYPQLKPMSEQEPAELIEAVTSAFGQVDVLVSNDIFALEFRPIDKYAVEDYRGAVEALQIKPFALVNAVASQMKKRKSGHIIFITSAAPFGPWKELSTYSSARAGTSALANALAKELGEYNIPVFAIGPNYLHSEDSPFYYPTEPWKINPEHVAHVKKVTALQRLGTQKELGELVAFLASGSCDYLTGQVFWLAGGFPVIERWPGMLE

SEQ ID NO: 219 - DNA, 768 bp, Artificial Sequence
  HHDH variant
  CDS (1)..(768)
atgagcaccgctattgtcaccaacgtcaaacattttggaggtatgggtagcgctctgaggctgagcgaagctggtcataccgtcgcttgccatgatgaaagctttaagcataaagatgaactggaagcttttgctgaagcctacccacagctgaaaccaatgagcgaacaggaaccagctgaactgattgaagctgtcaccagcgcttttggtcaggtcgatgtcctggtcagcaacgatatctttgctctagaatttcggccaatcgataaatacgctgtcgagaactacaggggtgctgtcgaagctctgcagatcaggccatttgctctagtgaatgctgtggcttcgcaaatgaagaagcgaaagtcggggcacatcatcttcatcacttcggctgccccgttcgggccatggaaggagctatcgacttactcttcggctcgagctggggctagtgcactagctaatgctctatcgaaggagctaggagagtacaatatcccggtgttcgctatcgggccgaattacctacactcggaggattcgccgttctattaccccactgagccgtggaagattaatccggagcacgtggctcacgtgaagaaggtgactgctctacaacgactagggactcaaaaagagttgggggaattggtggcatttttggcatctggctcttgtgattatttgactggccaggtgttttggttggcaggcggctttcccgctatagaacgttggcccggcatgctggaataatga

SEQ ID NO: 220 - protein, 254 aa, Artificial Sequence
  HHDH variant
MSTAIVTNVKHFGGMGSALRLSEAGHTVACHDESFKHKDELEAFAEAYPQLKPMSEQEPAELIEAVTSAFGQVDVLVSNDIFALEFRPIDKYAVENYRGAVEALQIRPFALVNAVASQMKKRKSGHIIFITSAAPFGPWKELSTYSSARAGASALANALSKELGEYNIPVFAIGPNYLHSEDSPFYYPTEPWKINPEHVAHVKKVTALQRLGTQKELGELVAFLASGSCDYLTGQVFWLAGGFPAIERWPGMLE

SEQ ID NO: 221 - DNA, 768 bp, Artificial Sequence
  HHDH variant
  CDS (1)..(768)
atgagcaccgctattgtcaccaacgtcaaacattttggaggtatgggtagcgctctgaggctgagcgaagctggtcataccgtcgcttgccatgatggtagctttaagcataaagatgaactggaagcttttgctgaaacctacccacagctgaaaccaatgagcgaacaggaaccagctgaactgattgaagctgtcaccagcgcttttggtcaggtcgatgtcctggtcagcaacgatatctttgctctacaatttcggccaatcgataaatacgctgtcgaggattacaggggtgctgtcgaagctctgcagatcaagccatttgctctagtgaatgctgtggcttcgcaaatgaagaagcgaaagtcggggcacatcatcttcatcacttcggctgccccgttcgggccatggaaggagctatcgacttactcttcggctcgagctgggactagtgcactagctaatgctctagctaaggagctaggagagtacaatatcccggtgttcgctatcgggccgaattacctacactcggaggattcgccgttctattaccccactgagccgtggaagattaatccggagcacgtggctcacgtgaagaaggtgactgctctacaacgactagggactcaaaaagagttgggggaattggtggcatttttggcatctggctcttgtgattatttgactggccaggtgttttggttggcaggcggctttcccgctatagaacgttggcccggcatgctggaataatga

SEQ ID NO: 222 - protein, 254 aa, Artificial Sequence
  HHDH variant
MSTAIVTNVKHFGGMGSALRLSEAGHTVACHDGSFKHKDELEAFAETYPQLKPMSEQEPAELIEAVTSAFGQVDVLVSNDIFALQFRPIDKYAVEDYRGAVEALQIKPFALVNAVASQMKKRKSGHIIFITSAAPFGPWKELSTYSSARAGTSALANALAKELGEYNIPVFAIGPNYLHSEDSPFYYPTEPWKINPEHVAHVKKVTALQRLGTQKELGELVAFLASGSCDYLTGQVFWLAGGFPAIERWPGMLE

SEQ ID NO: 223 - DNA, 768 bp, Artificial Sequence
  HHDH variant
  CDS (1)..(768)
atgagcaccgctattgtcaccaacgtcaaacattttggaggtatgggtagcgctctgaaactgagcgaagctggtcataccgtcgcttgccatgatggtagctttaagcataaagatgaactggaagcttttgctgaagcctacccacagctgaaaccaatgagcgaacaggaaccagctgaactgattgaagctgtcaccagcgcttttggtcaggtcgatgtcctggtcagcaacgatatctttgctctagaatttcggccaatcgataaatacgctgtcgaggattacaggggtgctgtcgaagctctgcagatccgcccatttgctctagtgcatgctgtggcttcgcaaatgaagaagcgaaagtcggggcacatcatcttcatcacttcggctgccccgttcgggccatggaaggagctatcgacttactcttcggctcgagctggggctagtgcactagctaatgctctatcgaaggagctaggagagtacaatatcccggtgttcgctatcgggccgaattacctacactcggaggattcgccgtactattaccccactgagccgtggaagattaatccggagcacgtggctcacgtgaagaaggtgactgctctacgtcgactagggactcaaaaagagttgggggaattggtggcatttttggcatctggctcttgtgattatttgactggccaggtgttttggttggcaggcggctttcccgctatagaacgttggcccggcatgcccgaataatga

SEQ ID NO: 224 - protein, 254 aa, Artificial Sequence
  HHDH variant
MSTAIVTNVKHFGGMGSALKLSEAGHTVACHDGSFKHKDELEAFAEAYPQLKPMSEQEPAELIEAVTSAFGQVDVLVSNDIFALEFRPIDKYAVEDYRGAVEALQIRPFALVHAVASQMKKRKSGHIIFITSAAPFGPWKELSTYSSARAGASALANALSKELGEYNIPVFAIGPNYLHSEDSPYYYPTEPWKINPEHVAHVKKVTALRRLGTQKELGELVAFLASGSCDYLTGQVFWLAGGFPAIERWPGMPE

SEQ ID NO: 225 - DNA, 768 bp, Artificial Sequence
  HHDH variant
  CDS (1)..(768)
atgagcaccgctattgtcaccaacgtcaaacattttggtggtatgggtagcgctctgaggctgagcgaagctggtcataccgtcgcttgccatgatgaaagctttaagcataaagatgaactggaagcttttgctgaaacctacccacagctgaaaccaatgagcgaacaggaaccagctgaactgattgaagctgtcaccagcgcttttggtcaggtcgatgtcctggtcagcaacgatatctttgctctagaatttcggccaatcgataaatacgctgtcgaggattacaggggtgctgtcgaagctctgcagatcaggccatttgctctagtgaatgctgtggcttcgcaaatgaagaagcgaaagtcggggcacatcatcttcatcacttcggctgccccgttcgggccatggaaggagctatcgacttactcttcggctcgagctggggctagtgcactagctaatgctctatcgaaggagctaggagagtacaatatcccggtgttcgctatcgggccgaattacctacactcggaggattcgccgtactattaccccactgagccgtggaagattaatccggagcacgtggctcacgtgaagaaggtgactgctctacaacgactagggactcaaaaagagttgggggaattggtggcatttttggcatctggctcttgtgattatttgactggccaggtgttttggttggcaggcggctttcccgtcatagaacgttggcccggcatgcccgaataatga

SEQ ID NO: 226 - protein, 254 aa, Artificial Sequence; identical to SEQ ID NO: 98
  HHDH variant

SEQ ID NO: 227 - DNA, 768 bp, Artificial Sequence
  HHDH variant
  CDS (1)..(768)
atgagcaccgctattgtcaccaacgtcaaacattttggaggtatgggtagcgctctgaggctgagcgaagctggtcataccgtcgcttgccatgatggtagctttaagcataaagatgaactggaagcttttgctgaaacctacccacagctgaaaccaatgaccgaacaggaaccagctgaactgattgaagctgtcaccagcgcttttggtcaggtcgatgtcctggtcagcaacgatatctttgctctagaatttcggccaatcgataaatacgctgtcgaggattacaggggtgctgtcgaagctctgcagatccgcccatttgctctagtgaatgctgtggctccacaaatgaagaagcgaaagtcggggcacatcatcttcatcacttcggctgccccgttcgggccatggaaggagctatcgacttactcttcggctcgagctggggctagtgcactagctaatgctctatcgaaggagctaggagagtacaatatcccggtgttcgctatcgggccgaattacctacactcggaggattcgccgttctattaccccactgagccgtggaagattaatccggagcacgtggctcacgtgaagaaggtgactgctctacaacgactagggactcaaaaagagttgggggaattggtggcatttttggcatctggctcttgtgattatttgactggccaggtgttttggttggcaggcggctttcccgctatagaacgttggcccggcatgcccgaataatga

SEQ ID NO: 228 - protein, 254 aa, Artificial Sequence
  HHDH variant
MSTAIVTNVKHFGGMGSALRLSEAGHTVACHDGSFKHKDELEAFAETYPQLKPMTEQEPAELIEAVTSAFGQVDVLVSNDIFALEFRPIDKYAVEDYRGAVEALQIRPFALVNAVAPQMKKRKSGHIIFITSAAPFGPWKELSTYSSARAGASALANALSKELGEYNIPVFAIGPNYLHSEDSPFYYPTEPWKINPEHVAHVKKVTALQRLGTQKELGELVAFLASGSCDYLTGQVFWLAGGFPAIERWPGMPE

SEQ ID NO: 229 - DNA, 768 bp, Artificial Sequence
  HHDH variant
  CDS (1)..(768)
atgagcaccgctattgtcaccaacgtcaaacattttggaggtatgggtagcgctctgaaactgagcgaagctggtcataccgtcgcttgccatgatgaaagctttaagcataaagatgaactggaagcttttgctgaagcctacccacagctgaaaccaatgagcgaacaggaaccagctgaactgattgaagctgtcaccagcgcttttggtcaggtcgatgtcctggtcagcaacgatatctttgctctagaatttcggccaatcgataaatacgctgtcgaggattacaggggtgctgtcgaagctctgcagatcaagccatttgctctagtgaatgctgtggcttcgcaaatgaagaagcgaaagtcggggcacatcatcttcatcacttcggctgccccgttcgggccatggaaggagctatcgacttactcttcggctcgagctgggactagtgcactagctaatgctctatcgaaggagctaggagagtacaatatcccggtgttcgctatcgggccgaattacctacactcggaggattcgccgttctattaccccactgagccgtggaagattaatccggagcacgtggctcacgtgaagaaggtgactgctctacaacgactagggactcaaaaagagttgggggaattggtggcatttttggcatctggctcttgtgattatttgactggccaggtgttttggttggcaggcggctttcccgtcatagaacgttggcccggcatgcccgaataatga

SEQ ID NO: 230 - protein, 254 aa, Artificial Sequence
  HHDH variant
MSTAIVTNVKHFGGMGSALKLSEAGHTVACHDESFKHKDELEAFAEAYPQLKPMSEQEPAELIEAVTSAFGQVDVLVSNDIFALEFRPIDKYAVEDYRGAVEALQIKPFALVNAVASQMKKRKSGHIIFITSAAPFGPWKELSTYSSARAGTSALANALSKELGEYNIPVFAIGPNYLHSEDSPFYYPTEPWKINPEHVAHVKKVTALQRLGTQKELGELVAFLASGSCDYLTGQVFWLAGGFPVIERWPGMPE

SEQ ID NO: 231 - DNA, 768 bp, Artificial Sequence
  HHDH variant
  CDS (1)..(768)
atgagcaccgctattgtcaccaacgtcaaacattttggaggtatgggtagcgctctgaggctgagcgaagctggtcataccgtcgcttgccatgatgaaagctttaagcataaagatgaactggaagcttttgctgaagcctacccacagctgaaaccaatgagcgaacaggaaccagctgaactgattgaagctgtcaccagcgcttttggtcatgtcgatgtcctggtcagcaacgatatctttgctctagaatttcggccaatcgataaatacgctgtcgaggattacaggggtgctgtcgaagctctgcagatccgcccatttgctctagtgaatgctgtggcttcgcaaatgaagaagcgaaagtcggggcacatcatcttcatcacttcggctgccccgttcgggccatggaaggagctatcgacttactcttcggctcgagctggggctagtgcactagctaatgctctatcgaaggagctaggagagtacaatatcccggtgttcgctatcgggccgaattacctacactcggaggattcgccgtactattaccccactgagccgtggaagattaatccggagtatgtggctcacgtgaagaaggtgactgctctacgtcgactagggactcaaaaagagttgggggaattggtggcatttttggcatctggctcttgtgattatttgactggccaggtgttttggttggcaggcggctttcccgctatagaacgttggcccggcatgctggaataatga

SEQ ID NO: 232 - protein, 254 aa, Artificial Sequence
  HHDH variant
MSTAIVTNVKHFGGMGSALRLSEAGHTVACHDESFKHKDELEAFAEAYPQLKPMSEQEPAELIEAVTSAFGHVDVLVSNDIFALEFRPIDKYAVEDYRGAVEALQIRPFALVNAVASQMKKRKSGHIIFITSAAPFGPWKELSTYSSARAGASALANALSKELGEYNIPVFAIGPNYLHSEDSPYYYPTEPWKINPEYVAHVKKVTALRRLGTQKELGELVAFLASGSCDYLTGQVFWLAGGFPAIERWPGMLE

SEQ ID NO: 233 - DNA, 768 bp, Artificial Sequence
  HHDH variant
  CDS (1)..(768)
atgagcaccgctattgtcaccaacgtcaaacattttggaggtatgggtagcgctctgaggctgagcgaagctggtcataccgtcgcttgccatgatgaaagctttaagcataaagatgaactggaagcttttgctgaaacctacccacagctgaaaccaatgagcgaacaggaaccagctgaactgattgaagctgtcaccagcgcttttggtcatgtcgatgtcctggtcagcaacgatatctttgctctagaatttcggccaatcgataaatacgctgtcgaggattacaggggtgctgtcgaagctctgcagatcaagccatttgctctagtgaatgctgtggctccacaaatgaagaagcgaaagtcggggcacatcatcttcatcacttcggctgccccgttcgggccatggaaggagctatcgacttactcttcggctcgagctgggactagtgcactagctaatgctctatcgaaggagctaggagagtacaatatcccggtgttcgctatcgggccgaattacctacactcggaggattcgccgtactattaccccactgagccgtggaagattaatccggagcacgtggctcacgtgaagaaggtgactgctctacaacgactagggactcaaaaagagttgggggaattggtggcatttttggcatctggctcttgtgattatttgactggccaggtgttttggttggcaggcggctttcccgtcatagaacgttggcccggcatgcccgaataatga

SEQ ID NO: 234 - protein, 254 aa, Artificial Sequence
  HHDH variant
MSTAIVTNVKHFGGMGSALRLSEAGHTVACHDESFKHKDELEAFAETYPQLKPMSEQEPAELIEAVTSAFGHVDVLVSNDIFALEFRPIDKYAVEDYRGAVEALQIKPFALVNAVAPQMKKRKSGHIIFITSAAPFGPWKELSTYSSARAGTSALANALSKELGEYNIPVFAIGPNYLHSEDSPYYYPTEPWKINPEHVAHVKKVTALQRLGTQKELGELVAFLASGSCDYLTGQVFWLAGGFPVIERWPGMPE

SEQ ID NO: 235 - DNA, 768 bp, Artificial Sequence
  HHDH variant
  CDS (1)..(768)
atgaacaccgttattgtcaccaacgtcaaacattttggaggtatgggtagcgctttgaaactgagcgaagctggtcataccgtcgcttgccatgatgaaagctttaagcataaagatgaactggaagcttttgctgaaacctacccacagctgaaaccaatgagcgaacaggaaccagctgaactgattgaagctgtcaccagcgcttttggtcaggtcgatgtcctggtcagcaacgatatctttgctctagaatttcggccaatcgataaatacgctgtcgaggattacaggggtgctgtcgaagctctgcagatcaggccatttgctctagtgaatgctgtggcttcgcaaatgaagaagcgaaagtcggggcacatcatcttcatcacttcggctgccccgttcgggccatggaaggagctatcgacttactcttcggctcgagctggggctagtgcactagctaatgctctatcgaaggagctaggagagtacaatatcccggtgttcgctatcgggccgaattacctacactcggaggattcgccgtactattaccccactgagccgtggaagattaatccggagcacgtggctcacgtgaagaaggtgactgctctacaacgactagggactcaaaaagagttgggggaattggtggcatttttggcatctggctcttgtgattatttgactggccaggtgttttggttggcaggcggctttcccgtcatagaacgttggcccggcatgcccgaataatga

SEQ ID NO: 236 - protein, 254 aa, Artificial Sequence
  HHDH variant
MNTVIVTNVKHFGGMGSALKLSEAGHTVACHDESFKHKDELEAFAETYPQLKPMSEQEPAELIEAVTSAFGQVDVLVSNDIFALEFRPIDKYAVEDYRGAVEALQIRPFALVNAVASQMKKRKSGHIIFITSAAPFGPWKELSTYSSARAGASALANALSKELGEYNIPVFAIGPNYLHSEDSPYYYPTEPWKINPEHVAHVKKVTALQRLGTQKELGELVAFLASGSCDYLTGQVFWLAGGFPVIERWPGMPE

SEQ ID NO: 237 - DNA, 768 bp, Artificial Sequence
  HHDH variant
  CDS (1)..(768)
atgagcaccgctattgtcaccaacgtcaaacattttggaggtatgggtagcgctctgaaactgagcgaagctggtcataccgtcgcttgccatgatgaaagctttaagcataaagatgaactggaagcttttgctgaaacctacccacagctgaaaccaatgagcgaacaggaaccagctgaactgattgaagctgtcaccagcgcttttggtcatgtcgatgtcctggtcagcaacgatatctttgctctagaatttcggccaatcgataaatacgctgtcgaggattacaggggtgctgtcgaagctctgcagatcaggccatttgctctagtgaatgctgtggcttcgcaaatgaagaagcgaaagtcggggcacatcatcttcatcacttcggctgccccgttcgggccatggaaggagctatcgacttactcttcggctcgagctggggctagtgcactagctaatgctctatcgaaggagctaggagagtacaatatcccggtgttcgctatcgggccgaattacctacactcggaggattcgccgtactattaccccactgagccgtggaagattaatccggagcacgtggctcacgtgaagaaggtgactgctctacaacgactagggactcaaaaagagttgggggaattggtggcatttttggcatctggctcttgtgattatttgactggccaggtgttttggttggcaggcggctttcccgtcatagaacgttggcccggcatgcccgaataatga

SEQ ID NO: 238 - protein, 254 aa, Artificial Sequence
  HHDH variant
MSTAIVTNVKHFGGMGSALKLSEAGHTVACHDESFKHKDELEAFAETYPQLKPMSEQEPAELIEAVTSAFGHVDVLVSNDIFALEFRPIDKYAVEDYRGAVEALQIRPFALVNAVASQMKKRKSGHIIFITSAAPFGPWKELSTYSSARAGASALANALSKELGEYNIPVFAIGPNYLHSEDSPYYYPTEPWKINPEHVAHVKKVTALQRLGTQKELGELVAFLASGSCDYLTGQVFWLAGGFPVIERWPGMPE

SEQ ID NO: 239 - DNA, 768 bp, Artificial Sequence
  HHDH variant
  CDS (1)..(768)
atgagcaccgctattgtcaccaacgtcaaacattttggaggtatgggtagcgctctgaaactgagcgaagctggtcataccgtcgcttgccatgatgaaagctttaagcataaagatgaactggaagcctttgctgaaacctacccacagctgaaaccaatgagcgaacaggaaccagctgaactgattgaagctgtcaccagcgcttttggtcaggtcgatgtcctggtcagcaacgatatctttgctctagaatttcggccaatcgataaatacgctgtcgaggattacaggggtgctgtcgaagctctgcagatcaggccatttgctctagtgaatgctgtggcttcgcaaatgaagaagcgaaagtcggggcacatcatcttcatcacttcggctgccccgttcgggccatggaaggagctatcgacttactcttcggctcgagctggggctagtgcactagctaatgctctatcgaaggagctaggagagtacaatatcccggtgttcgctatcgggccgaattacctacactcggaggattcgccgtactattaccccactgagccgtggaagattaatccggagcacgtggctcacgtgaagaaggtgactgctctacaacgactagggactcaaaaagagttgggggaattggtggcatttttggcatctggctcttgtgattatttgactggccaggtgttttggttggcaggcggctttcccgtcatagaacgttggcccggcatgcccgaataatga

SEQ ID NO: 240 - protein, 254 aa, Artificial Sequence
  HHDH variant
MSTAIVTNVKHFGGMGSALKLSEAGHTVACHDESFKHKDELEAFAETYPQLKPMSEQEPAELIEAVTSAFGQVDVLVSNDIFALEFRPIDKYAVEDYRGAVEALQIRPFALVNAVASQMKKRKSGHIIFITSAAPFGPWKELSTYSSARAGASALANALSKELGEYNIPVFAIGPNYLHSEDSPYYYPTEPWKINPEHVAHVKKVTALQRLGTQKELGELVAFLASGSCDYLTGQVFWLAGGFPVIERWPGMPE

SEQ ID NO: 241 - DNA, 768 bp, Artificial Sequence
  HHDH variant
  CDS (1)..(768)
atgagcaccgctattgtcaccaacgtcaaacattttggaggtatgggtagcgctctgaaactgagcgaagctggtcataccgtcgcttgccatgatgaaagctttaagcataaagatgaactggaagcttttgctgaaacctacccacagctgaaaccaatgagcgaacaggaaccagctgaactgattgaagctgtcaccagcgcttttggtcaggtcgatgtcctggtcagcaacgatatctttgctctagaatttcggccaatcgataaatacgctgtcgaggattacaggggtgctgtcgaagctctgcagatcaggccatttgctctagtgaatgctgtggcttcgcaaatgaagaagcgaaagtcggggcacatcatcttcatcacttcggctgccccgttcgggccatggaaggagctatcgacttactcttcggctcgagctggggctagtgcactagctaatgctctatcgaaggagctaggagagtacaatatcccggtgttcgctatcgggccgaattacctacactcggaggattcgccgtactattaccccactgagccgtggaagattaatccggagcacgtggctcacgtgaagaaggtgactgctctacaacgactagggactcaaaaagagttgggggaattggtggcatttttggcatctggctcttgtgattatttgactggccaggtgttttggttggcaggcggctttcccgtcatagaacgttggcccggcatgcccgaataatga

SEQ ID NO: 242 - protein, 254 aa, Artificial Sequence; identical to SEQ ID NO: 240
  HHDH variant

SEQ ID NO: 243 - DNA, 768 bp, Artificial
  HHDH variant
  CDS (1)..(768)
atgagcaccgctattgtcaccaacgtcaaacattttggaggtatgggtagcgctctgaaactgagcgaagctggtcataccgtcgcttgccatgatgaaagctttaagcataaagatgaactggaagcttttgctgaaacctacccacagctgaaaccaatggccgaacaggaaccagctgaactgattgaagctgtcaccagcgcttttggtcatgtcgatgtcctggtcagcaacgatatctttgctctagaatttcggccaatcgataaatacgctgtcgaggattacaggggtgctgtcgaagctctgcagatcaggccatttgctctagtgaatgctgtggcttcgcaaatgaagaagcgaaagtcggggcacatcatcttcatcacttcggctgccccgttcgggccatggaaggagctatcgacttactcttcagctcgagctggggctagtgcactagctaatgctctatcgaaggagctaggagagtacaatatcccggtgttcgctatcgggccgaattacctacactcggaggattcgccgtactattaccccactgagccgtggaagattaatccggagcacgtggctcacgtgaagaaggtgactgctctacaacgactagggactcaaaaagagttgggggaattggtggcatttttggcatctggctcttgtgattatttgactggccaggtgttttggttggcaggcggctttcccgtcatagaacgttggcccggcatgcccgaataatga

SEQ ID NO: 244 - protein, 254 aa, Artificial
  HHDH variant
MSTAIVTNVKHFGGMGSALKLSEAGHTVACHDESFKHKDELEAFAETYPQLKPMAEQEPAELIEAVTSAFGHVDVLVSNDIFALEFRPIDKYAVEDYRGAVEALQIRPFALVNAVASQMKKRKSGHIIFITSAAPFGPWKELSTYSSARAGASALANALSKELGEYNIPVFAIGPNYLHSEDSPYYYPTEPWKINPEHVAHVKKVTALQRLGTQKELGELVAFLASGSCDYLTGQVFWLAGGFPVIERWPGMPE

SEQ ID NO: 245 - DNA, 768 bp, Artificial Sequence
  HHDH variant
  CDS (1)..(768)
atgagcaccgctattgtcaccaacgtcaaacattttggaggtatgggtagcgctctgaaactgagcgaagctggtcataccgtcgcttgccatgatgaaagctttaagcataaagatgaactggaagcttttgctgaaacctacccacagctgaaaccactgagcgaacaggaaccagctgaactgattgaagctgtcaccagcgcttttggtcatgtcgatgtcctggtcagcaacgatatctttgctctagaatttcggccaatcgataaatacgctgtcgaggattacaggggtgctgtcgaagctctgcagatcaggccatttgctctagtgaatgctgtggcttcgcaaatgaagaagcgaaagtcggggcacatcatcttcatcacttcggctgccccgttcgggccatggaaggagctatcgacttactcttcggctcgagctggggctagtgcactagctaatgctctatcgaaggagctaggagagtacaatatcccggtgttcgctatcgggccgaattacctacactcggaggattcgccgtactattaccccactgagccgtggaagattaatccggagcacgtggctcacgtgaagaaggtgactgctctacaacgactagggactcaaaaagagttgggggaattggtggcatttttggcatctggctcttgtgattatttgactggccaggtgttttggttggcaggcggctttcccgtcatagaacgttggcccggcatgcccgaataatga

SEQ ID NO: 246 - protein, 254 aa, Artificial Sequence
  HHDH variant
MSTAIVTNVKHFGGMGSALKLSEAGHTVACHDESFKHKDELEAFAETYPQLKPLSEQEPAELIEAVTSAFGHVDVLVSNDIFALEFRPIDKYAVEDYRGAVEALQIRPFALVNAVASQMKKRKSGHIIFITSAAPFGPWKELSTYSSARAGASALANALSKELGEYNIPVFAIGPNYLHSEDSPYYYPTEPWKINPEHVAHVKKVTALQRLGTQKELGELVAFLASGSCDYLTGQVFWLAGGFPVIERWPGMPE

SEQ ID NO: 247 - DNA, 768 bp, Artificial Sequence
  HHDH variant
  CDS (1)..(768)
atgagcaccgctattgtcaccaacgtcaaacattttggaggtatgggtagcgctctgaaactgagcgaagctggtcataccgtcgcttgccatgatgaaagctttaagcataaagatgaactggaagcttttgctgaaacctacccacagctgaaaccaatgagcgaacaggaaccagctgaactgattgaagctgtcaccagcgcttttggtcatgtcgatgtcctggtcagcaacgatatctttgctctagaatttcggccaatcgataaatacgctgtcgaggattacaggggtgctgtcgaagctctgcagatcaggccatttgctctagtgaatgctgtggcttcgcaaatgaagaagcgaaagtcggggcacatcatcttcatcacttcggctgccccgttcgggccatggaaggagctatcgacttactcttcggctcgagctggggctagtgcactagctaatgctctatcgaaggagctaggagagtacaatatcccggtgttcgcaatcgggccgaattacctacactcggaggattcgccgtactattaccccactgagccgtggaagattaatccggagcacgtggctcacgtgaagaaggtgactgctctacaacgactagggactcaaaaagagttgggggaattggtggcatttttggcatctggctcttgtgattatttgactggccaggtgttttggttggcaggcggctttcccgtcatagaacgttggcccggcatgcccgaataatga

SEQ ID NO: 248 - protein, 254 aa, Artificial Sequence; identical to SEQ ID NO: 238
  HHDH variant

SEQ ID NO: 249 - DNA, 768 bp, Artificial Sequence
  HHDH variant
  CDS (1)..(768)
atgagcaccgctattgtcaccaacgtcaaacattttggaggtatgggtagcgctctgaaactgagcgaagctggtcataccgtcgcttgccatgatggtagctttaagcataaagatgaactggaagcttttgctgaaacctacccacagctgaaaccaatgagcgaacaggaaccagctgaactgattgaagctgtcaccagcgcttttggtcatgtcgatgtcctggtcagcaacgatatctttgctctagaatttcggccaatcgataaatacgctgtcgaggattacaggggtgctgtcgaagctctgcagatcaggccatttgctctagtgaatgctgtggcttcgcaaatgaagaagcgaaagtcggggcacatcatcttcatcacttcggctgccccgttcgggccatggaaggagctatcgacttactcttcggctcgagctggggctagtgcactagctaatgctctatcgaaggagctaggagagtacaatatcccggtgttcgctatcgggccgaattacctacactcggaggattcgccgtactattaccccactgagccgtggaagattaatccggagcacgtggctcacgtgaagaaggtgactgctctacaacgactagggactcaaaaagagttgggggaattggtggcatttttggcatctggctcttgtgattatttgactggccaggtgttttggttggcaggcggctttcccgtcatagaacgttggcccggcatgcccgaataatga

SEQ ID NO: 250 - protein, 254 aa, Artificial Sequence
  HHDH variant
MSTAIVTNVKHFGGMGSALKLSEAGHTVACHDGSFKHKDELEAFAETYPQLKPMSEQEPAELIEAVTSAFGHVDVLVSNDIFALEFRPIDKYAVEDYRGAVEALQIRPFALVNAVASQMKKRKSGHIIFITSAAPFGPWKELSTYSSARAGASALANALSKELGEYNIPVFAIGPNYLHSEDSPYYYPTEPWKINPEHVAHVKKVTALQRLGTQKELGELVAFLASGSCDYLTGQVFWLAGGFPVIERWPGMPE

SEQ ID NO: 251 - DNA, 768 bp, Artificial Sequence
  HHDH variant
  CDS (1)..(768)
atgagcaccgctattgtcaccaacgtcaaacattttggaggtatgggtagcgctctgaggctgagcgaagctggtcataccgtcgcttgccatgatgaaagctttaagcataaagatgaactggaagcttttgctgaagcctacccacagctgaaaccaatgagcgaacaggaaccagctgaactgattgaagctgtcaccagcgcttttggtcaggtcgatgtcctggtcagcaacgatatctttgctctagaatttcggccaatcgataaatacgctgtcgaggattacaggggtgctgtcgaagctctgcagatccgcccatttgctctagtgaatgcagtggcttcgcaaatgaagaagcgaaagtcggggcacatcatcttcatcacttcggctgccccgttcgggccatggaaggagctatcgacttactcttcggctcgagctgggactagtgcactagctaatgctctatcgaaggagctaggagagtacaatatcccggtgttcgctatcgggccgaattacctacactcggaggattcgccgttctattaccccactgagccgtggaagattaatccggagtatgtggctcacgtgaagaaggtgactgctctacaacgactagggactcaaaaagagttgggggaattggtggcatttttggcatctggctcttgtgattatttgactggccaggtgttttggttggcaggcggctttcccgctatagaacgttggcccggcatgcccgaataatga

SEQ ID NO: 252 - protein, 254 aa, Artificial Sequence
  HHDH variant
MSTAIVTNVKHFGGMGSALRLSEAGHTVACHDESFKHKDELEAFAEAYPQLKPMSEQEPAELIEAVTSAFGQVDVLVSNDIFALEFRPIDKYAVEDYRGAVEALQIRPFALVNAVASQMKKRKSGHIIFITSAAPFGPWKELSTYSSARAGTSALANALSKELGEYNIPVFAIGPNYLHSEDSPFYYPTEPWKINPEYVAHVKKVTALQRLGTQKELGELVAFLASGSCDYLTGQVFWLAGGFPAIERWPGMPE

SEQ ID NO: 253 - DNA, 768 bp, Artificial Sequence
  HHDH variant
  CDS (1)..(768)
atgagcaccgctattgtcaccaacgtcaaacattttggaggtatgggtagcgctctgaggctgagcgaagctggtcataccgtcgcttgccatgatgaaagctttaagcataaagatgaactggaagcttttgctgaagcctacccacagctgaaaccaatgagcgaacaggaaccagctgaactgattgaagctgtcaccagcgcttttggtcaggtcgatgtcctggtcagcaacgatatctttgctctagaatttcggccaatcgataaatacgctgtcgaggattacaggggtgctgtcgaagctctgcagatccgcccatttgctctagtgaatgctgtggcttcgcaaatgaagaagcgaaagtcggggcacatcatcttcatcacttcggctgccccgttcgggccatggaaggagctatcgacttactcttcggctcgagctgggactagtgcactagctaatgctctatcgaaggagctaggagagtacgatatcccggtgttcgctatcgggccgaattacctacactcggaggattcgccgttctattaccccactgagccgtggaagattaatccggagcacgtggctcacgtgaagaaggtgactgctctacgtcgactagggactcaaaaagagttgggggaattggtggcatttttggcatctggctcttgtgattatttgactggccaggtgttttggttggcaggcggctttcccgctatagaacgttggcccggcatgcccgaataatga

SEQ ID NO: 254 - protein, 254 aa, Artificial Sequence
  HHDH variant
MSTAIVTNVKHFGGMGSALRLSEAGHTVACHDESFKHKDELEAFAEAYPQLKPMSEQEPAELIEAVTSAFGQVDVLVSNDIFALEFRPIDKYAVEDYRGAVEALQIRPFALVNAVASQMKKRKSGHIIFITSAAPFGPWKELSTYSSARAGTSALANALSKELGEYDIPVFAIGPNYLHSEDSPFYYPTEPWKINPEHVAHVKKVTALRRLGTQKELGELVAFLASGSCDYLTGQVFWLAGGFPAIERWPGMPE

SEQ ID NO: 255 - DNA, 768 bp, Artificial Sequence
  HHDH variant
  CDS (1)..(768)
atgagcaccgctattgtcaccaacgtcaaacattttggaggtatgggtagcgctctgaggctgagcgaagctggtcataccgtcgcttgccatgatgaaagctttaagcataaagatgaactggaagcttttgctgaagcctacccacagctgaaaccaatgggcgaacaggaaccagctgaactgattgaagctgtcaccagcgcttttggtcaggtcgatgtcctggtcagcaacgatatctttgctctagaatttcggccaatcgataaatacgctgtcgaggattacaggggtgctgtcgaagctctgcagatccgcccatttgctctagtgaatgctgtggcttcgcaaatgaagaagcgaaagtcggggcacatcatcttcatcacttcggctgccccgttcgggccatggaaggagctatcgacttactcttcggctcgagctgggactagtgcactagctaatgctctagctaaggagctaggagagtacaatatcccggtgttcgctatcgggccgaattacctacactcggaggattcgccgtactattaccccactgagccgtggaagattaatccggagcacgtggctcacgtgaagaaggtgactgctctacgtcgactagggactcaaaaagagttgggggaattggtggcatttttggcatctggctcttgtgattatttgactggccaggtgttttggttggcaggcggctttcccgctatagaacgttggcccggcatgcccgaataatga

SEQ ID NO: 256 - protein, 254 aa, Artificial Sequence
  HHDH variant
MSTAIVTNVKHFGGMGSALRLSEAGHTVACHDESFKHKDELEAFAEAYPQLKPMGEQEPAELIEAVTSAFGQVDVLVSNDIFALEFRPIDKYAVEDYRGAVEALQIRPFALVNAVASQMKKRKSGHIIFITSAAPFGPWKELSTYSSARAGTSALANALAKELGEYNIPVFAIGPNYLHSEDSPYYYPTEPWKINPEHVAHVKKVTALRRLGTQKELGELVAFLASGSCDYLTGQVFWLAGGFPAIERWPGMPE

SEQ ID NO: 257 - DNA, 768 bp, Artificial Sequence
  HHDH variant
  CDS (1)..(768)
atgagcaccgctattgtcaccaacgtcaaacattttggaggtatgggtagcgctctgaggctgagcgaagctggtcataccgtcgcttgccatgatgaaagctttaagcataaagatgaactggaagcttttgctgaaacctacccacagctgaaaccaatgagcgaacaggaaccagctgaactgattgaagctgtcaccagcgcttttggtcaggtcgatgtcctggtcagcaacgatatctttgctctagaatttcggccaatcgataaatacgctgtcgagaactacaggggtgctgtcgaagctctgcagatcaggccatttgctctagtgaatgctgtggcttcgcaaatgaagaagcgaaagtcggggcacatcatcttcatcacttcggctgccccgttcgggccatggaaggagctatcgacttactcttcggctcgagctggggctagtgcactagctaatgctctatcgaaggagctaggagagtacaatatcccggtgttcgctatcgggccgaattacctacactcggaggattcgccgtactattaccccactgagccgtggaagattaatccggagcacgtggctcacgtgaagaaggtgactgctctacaacgactagggactcaaaaagagttgggggaattggtggcatttttggcatctggctcttgtgattatttgactggccaggtgttttggttggcaggcggctttcccgtcatagaacgttggcccggcatgctggaataatga

SEQ ID NO: 258 - protein, 254 aa, Artificial Sequence
  HHDH variant
MSTAIVTNVKHFGGMGSALRLSEAGHTVACHDESFKHKDELEAFAETYPQLKPMSEQEPAELIEAVTSAFGQVDVLVSNDIFALEFRPIDKYAVENYRGAVEALQIRPFALVNAVASQMKKRKSGHIIFITSAAPFGPWKELSTYSSARAGASALANALSKELGEYNIPVFAIGPNYLHSEDSPYYYPTEPWKINPEHVAHVKKVTALQRLGTQKELGELVAFLASGSCDYLTGQVFWLAGGFPVIERWPGMLE

SEQ ID NO: 259 - DNA, 768 bp, Artificial Sequence
  HHDH variant
  CDS (1)..(768)
atgagcaccgctattgtcaccaacgtcaaacattttggaggtatgggtagcgctctgaggctgagcgaagctggtcataccgtcgcttgccatgatgaaagctttaagcataaagatgaactggaagcttttgctgaaacctacccacagctgaaaccaatgagcgaacaggaaccagctgaactgattgaagctgtcaccagcgcttttggtcaggtcgatgtcctggtcagcaacgatatctttgctctagaatttcgtccaatcgataaatactcagtcgagaactacaggggtgctgtcgaagctctgcagatcaggccatttgctctagtgaattcggtggcttcgcaaatgaagaagcgaaagtcggggcacatcatcttcatcacttcggctgccccgttcgggccatggaaggagctatcgacttactcttcggctcgagctggggctagtgcactagctaatgctctatcgaaggagctaggagagtacaatatcccggtgttcgctatcgggccgaattacctacactcggaggattcgccgtactattaccccactgagccgtggaagattaatccggagcacgtggctcacgtgaagaaggtgactgctctacaacgactagggactcaaaaggagttgggggaattggtggcatttttggcatctggctcttgtgattatttgactggccaggtgttttggttggcaggcggctttcccgtcatagaacgttggcccggcatgcccgaataatga

SEQ ID NO: 260 - protein, 254 aa, Artificial Sequence
  HHDH variant
MSTAIVTNVKHFGGMGSALRLSEAGHTVACHDESFKHKDELEAFAETYPQLKPMSEQEPAELIEAVTSAFGQVDVLVSNDIFALEFRPIDKYSVENYRGAVEALQIRPFALVNSVASQMKKRKSGHIIFITSAAPFGPWKELSTYSSARAGASALANALSKELGEYNIPVFAIGPNYLHSEDSPYYYPTEPWKINPEHVAHVKKVTALQRLGTQKELGELVAFLASGSCDYLTGQVFWLAGGFPVIERWPGMPE

SEQ ID NO: 261 - DNA, 768 bp, Artificial Sequence
  HHDH variant
  CDS (1)..(768)
atgagcaccgctattgtcaccaacgtcaaacattttggaggtatgggtagcgctctgaggctgagcgaagctggtcataccgtcgcttgccatgatgaaagctttaagcataaagatgaactggaagcttttgctgaaacctacccacagctgaaaccaatgagcgaacaggaaccagctgaactgattgaagctgtcaccagcgcttttggtcaggtcgatgtcctggtcagcaacgatatctttgctctagaatttcggccaatcgataaatacgctgtcgaggattacaggggtgctgtcgaagctctgcagatcaggccatttgctctagtgaatgctgtggcttcgcaaatgaagaagcgaaagtcggggcacatcatcttcatcacttcggctgccccgttcgggccatggaaggagctatcgacttactcttcggctcgagctgggactagtgcactagctaatgctctatcgaaggagctaggagagtacaatatcccggtgttcgctatcgggccgaattacctacactcggaggattcgccgtactattaccccactgagccgtggaagattaatccggagcacgtggctcacgtgaagaaggtgactgctctacaacgactagggactcaaaaagagttgggggaattggtggcatttttggcatctggctcttgtgattatttgactggccaggtgttttggttggcaggcggctttcccgtcatagaacgttggcccggcatgctggaataatga

SEQ ID NO: 262 - protein, 254 aa, Artificial Sequence
  HHDH variant
MSTAIVTNVKHFGGMGSALRLSEAGHTVACHDESFKHKDELEAFAETYPQLKPMSEQEPAELIEAVTSAFGQVDVLVSNDIFALEFRPIDKYAVEDYRGAVEALQIRPFALVNAVASQMKKRKSGHIIFITSAAPFGPWKELSTYSSARAGTSALANALSKELGEYNIPVFAIGPNYLHSEDSPYYYPTEPWKINPEHVAHVKKVTALQRLGTQKELGELVAFLASGSCDYLTGQVFWLAGGFPVIERWPGMLE

SEQ ID NO: 263 - DNA, 768 bp, Artificial Sequence
  HHDH variant
  CDS (1)..(768)
atgagcaccgctattgtcaccaacgtcaaacattttggaggtatgggtagcgctctgaggctgagcgaagctggtcataccgtcgcttgccatgatgaaagctttaagcataaagatgaactggaagcttttgctgaaacctacccacagctgaaaccaatgagcgaacaggaaccagctgaactgattgaagctgtcaccagcgcttttggtcaggtcgatgtcctggtcagcaacgatatctttgctctagaatttcggccaatcgataaatactcagtcgagaactacaggggtgctgtcgaagctctgcagatcagaccatttgctctagtgcatgctgtggctccacaaatgaagaagcgaaagtcggggcacatcatcttcatcacttcggctgccccgttcgggccatggaaggagctatcgacttactcttcggctcgagctggggctagtgcactagctaatgctctatcgaaggagctaggagagtacaatatcccggtgttcgctatcgggccgaattacctacactcggaggattcgccgtactattaccccactgagccgtggaagattaatccggagcacgtggctcacgtgaagaaggtgactgctctacaacgactagggactcaaaaagagttgggggaattggtggcatttttggcatctggctcttgtgattatttgactggccaggtgttttggttggcaggcggctttcccgtcatagaacgttggcccggcatgctggaataatga

SEQ ID NO: 264 - protein, 254 aa, Artificial Sequence
  HHDH variant
MSTAIVTNVKHFGGMGSALRLSEAGHTVACHDESFKHKDELEAFAETYPQLKPMSEQEPAELIEAVTSAFGQVDVLVSNDIFALEFRPIDKYSVENYRGAVEALQIRPFALVHAVAPQMKKRKSGHIIFITSAAPFGPWKELSTYSSARAGASALANALSKELGEYNIPVFAIGPNYLHSEDSPYYYPTEPWKINPEHVAHVKKVTALQRLGTQKELGELVAFLASGSCDYLTGQVFWLAGGFPVIERWPGMLE

SEQ ID NO: 265 - DNA, 768 bp, Artificial Sequence
  HHDH variant
  CDS (1)..(768)
atgagcaccgctattgtcaccaacgtcaaacattttggaggtatgggtagcgctctgaggctgagcgaagctggtcataccgtcgcttgccatgatgaaagctttaagcataaagatgaactggaagcttttgctgaaacctacccacagctgaaaccaatgagcgaacaggaaccagctgaactgattgaagctgtcaccagcgcttttggtcaggtcgatgtcctggtcagcaacgatatctttgctctagaatttcggccaatcgataaatacgctgtcgaggattacaggggtgctgtcgaagctctgcagatcaggccatttgctctagtgaatgctgtggcttcgcaaatgaagaagcgaaagtcggggcacatcatcttcatcacttcggctgccccgttcgggccatggaaggagctatcgacttactcttcggctcgagctggggctagtgcactagctaatgctctatcgaaggagctaggagagtacaatatcccggtgttcgctatcgggccgaattacctacactcggaggattcgccgtactattaccccactgagccgtggaagattaatccggagcacgtggctcacgtgaagaaggtgactgctctacaacgactagggactcaaaaagagttgggggaattggtggcatttttggcatctggctcttgtgattatttgactggccaggtgttttggttggcaggcggctttcccgtcatagaacgatggcccgacatgctggaataatga

SEQ ID NO: 266 - protein, 254 aa, Artificial Sequence
  HHDH variant
MSTAIVTNVKHFGGMGSALRLSEAGHTVACHDESFKHKDELEAFAETYPQLKPMSEQEPAELIEAVTSAFGQVDVLVSNDIFALEFRPIDKYAVEDYRGAVEALQIRPFALVNAVASQMKKRKSGHIIFITSAAPFGPWKELSTYSSARAGASALANALSKELGEYNIPVFAIGPNYLHSEDSPYYYPTEPWKINPEHVAHVKKVTALQRLGTQKELGELVAFLASGSCDYLTGQVFWLAGGFPVIERWPDMLE

SEQ ID NO: 267 - DNA, 768 bp, Artificial Sequence
  HHDH variant
  CDS (1)..(768)
atgagcaccgctattgtcaccaacgtcaaacattttggaggtatgggtagcgctctgaggctgagcgaagctggtcataccgtcgcttgccatgatgaaagctttaagcataaagatgaactggaagcttttgctgaaacctacccacagctgaaaccaatgagcgaacaggaaccagctgaactgattgaagctgtcaccagcgcttttggtcaggtcgatgtcctggtcagcaacgatatctttgctctacaatttcgtccaatcgataaatactcagtcgagaactacaggggtgctgtcgaagctctgcagatcaggccatttgctctagtgaattcggtggcttcgcaaatgaagaagcgaaagtcggggcacatcatcttcatcacttcggctgccccgttcgggccatggaaggagctatcgacttactcttcggctcgagctggggctagtgcactagctaatgctctatcgaaggagctaggagagtacaatatcccggtgttcgctatcgggccgaattacctacactcggaggattcgccgtactattaccccactgagccgtggaagattaatccggagcacgtggctcacgtgaagaaggtgactgctctacaacgactagggactcaaaaagagttgggggaattggtggcatttttggcatctggctcttgtgattatttgactggccaggtgttttggttggcaggcggctttcccgtcatagaacgttggcccggcatgctggaataatga

SEQ ID NO: 268 - protein, 254 aa, Artificial Sequence
  HHDH variant
MSTAIVTNVKHFGGMGSALRLSEAGHTVACHDESFKHKDELEAFAETYPQLKPMSEQEPAELIEAVTSAFGQVDVLVSNDIFALQFRPIDKYSVENYRGAVEALQIRPFALVNSVASQMKKRKSGHIIFITSAAPFGPWKELSTYSSARAGASALANALSKELGEYNIPVFAIGPNYLHSEDSPYYYPTEPWKINPEHVAHVKKVTALQRLGTQKELGELVAFLASGSCDYLTGQVFWLAGGFPVIERWPGMLE

SEQ ID NO: 269 - DNA, 768 bp, Artificial Sequence
  HHDH variant
  CDS (1)..(768)
atgagcaccgctattgtcaccaacgtcaaacattttggaggtatgggtagcgctctgaggctgagcgaagctggtcataccgtcgcttgccatgatgaaagctttaagcataaagatgaactggaagcttttgctgaaacctacccacagctgaaaccaatgagcgaacaggaaccagctgaactgattgaagctgtcaccagcgcttttggtcaggtcgatgtcctggtcagcaacgatatctttgctctagaatttcggccaatcgataaatactcagtcgaggattacaggggtgctgtcgaagctctgcagatcaggccatttgctctagtgaatgctgtggctccacaaatgaagaagcgaaagtcggggcacatcatcttcatcacttcggctgccccgttcgggccatggaaggagctatcgacttactcttcggctcgagctggggctagtgcactagctaatgctctatcgaaggagctaggagagtacaatatcccggtgttcgctatcgggccgaattacctacactcggaggattcgccgtactattaccccactgagccgtggaagattaatccggagcacgtggctcacgtgaagaaggtgactgctctacaacgactagggactcaaaaagagttgggggaattggtggcatttttggcatctggctcttgtgattatttgactggccaggtgttttggttggcaggcggctttcccgtcatagaacgttggcccggcatgccggaataatga

SEQ ID NO: 270 - protein, 254 aa, Artificial Sequence
  HHDH variant
MSTAIVTNVKHFGGMGSALRLSEAGHTVACHDESFKHKDELEAFAETYPQLKPMSEQEPAELIEAVTSAFGQVDVLVSNDIFALEFRPIDKYSVEDYRGAVEALQIRPFALVNAVAPQMKKRKSGHIIFITSAAPFGPWKELSTYSSARAGASALANALSKELGEYNIPVFAIGPNYLHSEDSPYYYPTEPWKINPEHVAHVKKVTALQRLGTQKELGELVAFLASGSCDYLTGQVFWLAGGFPVIERWPGMPE

SEQ ID NO: 271 - DNA, 768 bp, Artificial Sequence
  HHDH variant
  CDS (1)..(768)
atgagcaccgctattgtcaccaacgtcaaacattttggaggtatgggtagcgctctgaggctgagcgaagctggtcataccgtcgcttgccatgatgaaagctttaagcataaagatgaactggaagcttttgctgaagcctacccacagctgaaaccaatgagcgaacaggaaccagctgaactgattgaagctgtcaccagcgcttttggtcaggtcgatgtcctggtcagcaacgatatctttgctctagaatttcggccaatcgataaatacgctgtcgaggattacaggggtgctgtcgaagctctgcagatcaggccatttgctctagtgcattcggtggcttcgcaaatgaagaagcgaaagtcggggcacatcatcttcatcacttcggctgccccgttcgggccatggaaggagctatcgacttactcttcggctcgagctgggactagtgcactagctaatgctctatcgaaggagctaggagagtacaatatcccggtgttcgctatcgggccgaattacctacactcggaggattcgccgttctattaccccactgagccgtggaagattaatccggagcacgtggctcacgtgaagaaggtgactgctctacaacgactagggactcaaaaagagttgggggaattggtggcatttttggcatctggctcttgtgattatttgactggccaggtgttttggttggcaggcggctttcccgctatagaacgttggcccggcatgctggaataatga

SEQ ID NO: 272 - protein, 254 aa, Artificial Sequence
  HHDH variant
MSTAIVTNVKHFGGMGSALRLSEAGHTVACHDESFKHKDELEAFAEAYPQLKPMSEQEPAELIEAVTSAFGQVDVLVSNDIFALEFRPIDKYAVEDYRGAVEALQIRPFALVHSVASQMKKRKSGHIIFITSAAPFGPWKELSTYSSARAGTSALANALSKELGEYNIPVFAIGPNYLHSEDSPFYYPTEPWKINPEHVAHVKKVTALQRLGTQKELGELVAFLASGSCDYLTGQVFWLAGGFPAIERWPGMLE

SEQ ID NO: 273 - DNA, 768 bp, Artificial Sequence
  HHDH variant
  CDS (1)..(768)
atgaacaccgctattgtcaccaacgtcaaacattttggaggtatgggtagcgctctgaaactgagcgaagctggtcataccgtcgcttgccatgatgaaagctttaagcataaagatgaactggaagcttttgctgaagcctacccacagctgaaaccactgagcgaacaagaaccagctgaactgattgaagctgtcaccagcgcttttggtcaggtcgatgtcctggtcagcaacgatatctttgctctagaatttcggccaatcgataaatacgctgtcgaggattacaggggtgctgtcgaagctctgcagatcaggccatttgctctagtgaatgctgtggcttcgcaaatgaagaagcgaaagtcggggcacatcatcttcatcacttcggctgccccgttcgggccatggaaggagctatcgacttactcttcggctcgagctggggctagtgcactagctaatgctctatcgaaggagctaggagagtacaatatcccggtgttcgctatcgggccgaattacctacactcggaggattcgccgtactattaccccactgagccgtggaagattaatccggagcacgtggctcacgtgaagaaggtgactgctctacaacgactagggactcaaaaagagttgggggaattggtggcatttttggcatctggctcttgtgattatttgactggccaggtgttttggttggcaggcggctttcccgctatagaacgttggcccggcatgcccgaataatga

SEQ ID NO: 274 - protein, 254 aa, Artificial Sequence
  HHDH variant
MNTAIVTNVKHFGGMGSALKLSEAGHTVACHDESFKHKDELEAFAEAYPQLKPLSEQEPAELIEAVTSAFGQVDVLVSNDIFALEFRPIDKYAVEDYRGAVEALQIRPFALVNAVASQMKKRKSGHIIFITSAAPFGPWKELSTYSSARAGASALANALSKELGEYNIPVFAIGPNYLHSEDSPYYYPTEPWKINPEHVAHVKKVTALQRLGTQKELGELVAFLASGSCDYLTGQVFWLAGGFPAIERWPGMPE

SEQ ID NO: 275 - DNA, 768 bp, Artificial Sequence
  HHDH variant
  CDS (1)..(768)
atgagcaccgctattgtcaccaacgtcaaacattttggaggtatgggtagcgctctgaggctgagcgaagctggtcataccgtcgcttgccatgatggtagctttaagcataaagatgaactggaagcttttgctgaaacctacccacagctgaaaccaatgagcgaacaggaaccagctgaactgattgaagctgtcaccagcgcttttggtcaggtcgatgtcctggtcagcaacgatatctttgctctacaatttcggccaatcgataaatacgctgtcgaggattacaggggtgctgtcgaagctctgcagatccgcccatttgctctagtgaatgctgtggcttcgcaaatgaagaagcgaaagtcggggcacatcatcttcatcacttcggctgccccgttcgggccatggaaggagctatcgacttactcttcggctcgagctgggactagtgcactagctaatgctctagctaaggagctaggagagtacaatatcccggtgttcgctatcgggccgaattacctacactcggaggattcgccgttctattaccccactgagccgtggaagattaatccggagtatgtggctcacgtgaagaaggtgactgctctacgtcgactagggactcaaaaagagttgggggaattggtggcatttttggcatctggctcttgtgattatttgactggccaggtgttttggttggcaggcggctttcccgtcatagaacgttggcccggcatgcccgaataatga

SEQ ID NO: 276 - protein, 254 aa, Artificial Sequence
  HHDH variant
MSTAIVTNVKHFGGMGSALRLSEAGHTVACHDGSFKHKDELEAFAETYPQLKPMSEQEPAELIEAVTSAFGQVDVLVSNDIFALQFRPIDKYAVEDYRGAVEALQIRPFALVNAVASQMKKRKSGHIIFITSAAPFGPWKELSTYSSARAGTSALANALAKELGEYNIPVFAIGPNYLHSEDSPFYYPTEPWKINPEYVAHVKKVTALRRLGTQKELGELVAFLASGSCDYLTGQVFWLAGGFPVIERWPGMPE

SEQ ID NO: 277 - DNA, 768 bp, Artificial Sequence
  HHDH variant
  CDS (1)..(768)
atgagcaccgctattgtcaccaacgtcaaacattttggaggtatgggtagcgctctgaaactgagcgaagctggtcataccgtcgcttgccatgatgaaagctttaagcataaagatgaactggaagcttttgctgaagcctacccacagctgaaaccaatggccgaacaggaaccagctgaactgattgaagctgtcaccagcgcttttggtcaggtcgatgtcctggtcagcaacgatatctttgctctagaatttcggccaatcgataaatactcagtcgaggattacaggggtgctgtcgaagctctgcagatcaagccatttgctctagtgaattcggtggctccacaaatgaagaagcgaaagtcggggcacatcatcttcatcacttcggctgccccgttcgggccatggaaggagctatcgacttactcttcggctcgagctggggctagtgcactagctaatgctctatcgaaggagctaggagagtacaatatcccggtgttcgctatcgggccgaattacctacactcggaggattcgccgttctattaccccactgagccgtggaagattaatccggagcacgtggctcacgtgaagaaggtgactgctctacaacgactagggactcaaaaagagttgggggaattggtggcatttttggcatctggctcttgtgattatttgactggccaggtgttttggttggcaggcggctttcccgctatagaacgttggcccggcatgctggaataatga

SEQ ID NO: 278 - protein, 254 aa, Artificial Sequence
  HHDH variant
MSTAIVTNVKHFGGMGSALKLSEAGHTVACHDESFKHKDELEAFAEAYPQLKPMAEQEPAELIEAVTSAFGQVDVLVSNDIFALEFRPIDKYSVEDYRGAVEALQIKPFALVNSVAPQMKKRKSGHIIFITSAAPFGPWKELSTYSSARAGASALANALSKELGEYNIPVFAIGPNYLHSEDSPFYYPTEPWKINPEHVAHVKKVTALQRLGTQKELGELVAFLASGSCDYLTGQVFWLAGGFPAIERWPGMLE

SEQ ID NO: 279 - DNA, 768 bp, Artificial Sequence
  HHDH variant
  CDS (1)..(768)
atgagcaccgctattgtcaccaacgtcaaacattttggaggtatgggtagcgctctgaaactgagcgaagctggtcataccgtcgcttgccatgatggtagctttaagcataaagatgaactggaagcttttgctgaagcctacccacagctgaaaccaatggccgaacaggaaccagctgaactgattgaagctgtcaccagcgcttttggtcaggtcgatgtcctggtcagcaacgatatctttgctctagaatttcggccaatcgataaatacgctgtcgaggattacaggggtgctgtcgaagctctgcagatccgcccatttgctctagtgaatgctgtggcttcgcaaatgaagaagcgaaagtcggggcacatcatcttcatcacttcggctgccccgttcgggccatggaaggagctatcgacttactcttcggctcgagctgggactagtgcactagctaatgctctatcgaaggagctaggagagtacaatatcccggtgttcgctatcgggccgaattacctacactcggaggattcgccgtactattaccccactgagccgtggaagattaatccggagcacgtggctcacgtgaagaaggtgactgctctacaacgactagggactcaaaaagagttgggggaattggtggcatttttggcatctggctcttgtgattatttgactggccaggtgttttggttggcaggcggctttcccgtcatagaacgttggcccggcatgcccgaataatga

SEQ ID NO: 280 - protein, 254 aa, Artificial Sequence
  HHDH variant
MSTAIVTNVKHFGGMGSALKLSEAGHTVACHDGSFKHKDELEAFAEAYPQLKPMAEQEPAELIEAVTSAFGQVDVLVSNDIFALEFRPIDKYAVEDYRGAVEALQIRPFALVNAVASQMKKRKSGHIIFITSAAPFGPWKELSTYSSARAGTSALANALSKELGEYNIPVFAIGPNYLHSEDSPYYYPTEPWKINPEHVAHVKKVTALQRLGTQKELGELVAFLASGSCDYLTGQVFWLAGGFPVIERWPGMPE

SEQ ID NO: 281 - DNA, 768 bp, Artificial Sequence
  HHDH variant
  CDS (1)..(768)
atgagcaccgctattgtcaccaacgtcaaacattttggaggtatgggtagcgctctgaggctgagcgaagctggtcataccgtcgcttgccatgatgaaagctttaagcataaagatgaactggaagcttttgctgaagcctacccacagctgaaaccaatgagcgaacaggaaccagctgaactgattgaagctgtcaccagcgcttttggtcaggtcgatgtcctggtcagcaacgatatctttgctctagaatttcggccaatcgataaatacgctgtcgaggattacaggggtgttgtcgaagctctgcagatcaagccatttgctctagtgaatgctgtggcttcgcaaatgaagaagcgaaagtcggggcacatcatcttcatcacttcggctgccccgttcgggccatggaaggagctatcgacttactcttcggctcgagctggggctagtgcactagctaatgctctatcgaaggagctaggagagtacaatatcccggtgttcgctatcgggccgaattacctacactcggaggattcgccgttctattaccccactgagccgtggaagattaatccggagcacgtggctcacgtgaagaaggtgactgctctacaacgactagggactcaaaaagagttgggggaattggtggcatttttggcatctggctcttgtgattatttgactggccaggtgttttggttggcaggcggctttcccgctatagaacgttggcccggcatgctggaataatga

SEQ ID NO: 282 - protein, 254 aa, Artificial Sequence
  HHDH variant
MSTAIVTNVKHFGGMGSALRLSEAGHTVACHDESFKHKDELEAFAEAYPQLKPMSEQEPAELIEAVTSAFGQVDVLVSNDIFALEFRPIDKYAVEDYRGVVEALQIKPFALVNAVASQMKKRKSGHIIFITSAAPFGPWKELSTYSSARAGASALANALSKELGEYNIPVFAIGPNYLHSEDSPFYYPTEPWKINPEHVAHVKKVTALQRLGTQKELGELVAFLASGSCDYLTGQVFWLAGGFPAIERWPGMLE

SEQ ID NO: 283 - DNA, 768 bp, Artificial Sequence
  HHDH variant
  CDS (1)..(768)
atgagcaccgctattgtcaccaacgtcaaacattttggaggtatgggtagcgctctgaaactgagcgaagctggtcataccgtcgcttgccatgatgaaagctttaagcataaagatgaactggaagcttttgctgaaacctacccacagctgaaaccaatgagcgaacaggaaccagctgaactgattgaagctgtcaccagcgcttttggtcatgtcgatgtcctggtcagcaacgatatctttgctctagaatttcggccaatcgataaatactcagtcgaggattacaggggtgctgtcgaagctctgcagatcaggccatttgctctagtgaattcggtggctccacaaatgaagaagcgaaagtcggggcacatcatcttcatcacttcggctgccccgttcgggccatggaaggagctatcgacttactcttcggctcgagctgggactagtgcactagctaatgctctatcgaaggagctaggagagtacaatatcccggtgttcgctatcgggccgaattacctacactcggaggattcgccgtactattaccccactgagccgtggaagattaatccggagcacgtggctcacgtgaagaaggtgactgctctacaacgactagggactcaaaaagagttgggggaattggtggcatttttggcatctggctcttgtgattatttgactggccaggtgttttggttggcaggcggctttcccgctatagaacgttggcccggcatgctggaataatga

SEQ ID NO: 284 - protein, 254 aa, Artificial Sequence
  HHDH variant
MSTAIVTNVKHFGGMGSALKLSEAGHTVACHDESFKHKDELEAFAETYPQLKPMSEQEPAELIEAVTSAFGHVDVLVSNDIFALEFRPIDKYSVEDYRGAVEALQIRPFALVNSVAPQMKKRKSGHIIFITSAAPFGPWKELSTYSSARAGTSALANALSKELGEYNIPVFAIGPNYLHSEDSPYYYPTEPWKINPEHVAHVKKVTALQRLGTQKELGELVAFLASGSCDYLTGQVFWLAGGFPAIERWPGMLE

SEQ ID NO: 285 - DNA, 768 bp, Artificial Sequence
  HHDH variant
  CDS (1)..(768)
atgagcaccgctattgtcaccaacgtcaaacattttggaggtatgggtagcgctctgaggctgagcgaagctggtcataccgtcgcttgccatgatggtagctttaagcataaagatgaactggaagcttttgctgaagcctacccacagctgaaaccaatgagcgaacaggaaccagctgaactgattgaagctgtcaccagcgcttttggtcatgtcgatgtcctggtcagcaacgatatctttgctctagaatttcggccaatcgataaatacgctgtcgaggattacaggggtgctgtcgaagctctgcagatcaagccatttgctctagtgaatgctgtggcttcgcaaatgaagaagcgaaagtcggggcacatcatcttcatcacttcggctgccccgttcgggccatggaaggagctatcgacttactcttcggctcgagctggggctagtgcactagctaatgctctatcgaaggagctaggagagtacaatatcccggtgttcgctatcgggccgaattacctacactcggaggattcgccgttctattaccccactgagccgtggaagattaatccggagcacgtggctcacgtgaagaaggtgactgctctacaacgactagggactcaaaaagagttgggggaattggtggcatttttggcatctggctcttgtgattatttgactggccaggtgttttggttggcaggcggctttcccgtcatagaacgttggcccggtatgctggaataatga

SEQ ID NO: 286 - protein, 254 aa, Artificial Sequence
  HHDH variant
MSTAIVTNVKHFGGMGSALRLSEAGHTVACHDGSFKHKDELEAFAEAYPQLKPMSEQEPAELIEAVTSAFGHVDVLVSNDIFALEFRPIDKYAVEDYRGAVEALQIKPFALVNAVASQMKKRKSGHIIFITSAAPFGPWKELSTYSSARAGASALANALSKELGEYNIPVFAIGPNYLHSEDSPFYYPTEPWKINPEHVAHVKKVTALQRLGTQKELGELVAFLASGSCDYLTGQVFWLAGGFPVIERWPGMLE

SEQ ID NO: 287 - DNA, 768 bp, Artificial Sequence
  HHDH variant
  CDS (1)..(768)
atgagcaccgctattgtcaccaacgtcaaacattttggaggtatgggtagcgctctgaggctgagcgaagctggtcataccgtcgcttgccatgatgaaagctttaagcataaagatgaactggaagcttttgctgaaacctacccacagctgaaaccaatgagcgaacaggaaccagctgaactgattgaagctgtcaccagcgcttttggtcatgtcgatgtcctggtcagcaatgatatctttgctctagaatttcggccaatcgataaatacgctgtcgaggattacaggggtgctgtcgaagctctgcagatcaagccatttgctctagtgaatgctgtggcttcgcaaatgaagaagcgaaagtcggggcacatcatcttcatcacttcggctgccccgttcgggccatggaaggagctatcgacttactcttcggctcgagctggggctagtgcactagctaatgctctatcgaaggagctaggagagtacaatatcccggtgttcgctatcgggccgaattacctacactcggaggattcgccgtactattaccccactgagccgtggaagattaatccggagcacgtggctcacgtgaagaaggtgactgctctacaacgactagggactcaaaaagagttgggggaattggtggcatttttggcatctggctcttgtgattatttgactggccaggtgttttggttggcaggcggctttcccgctatagaacgttggcccggcatgctggaataatga

SEQ ID NO: 288 - protein, 254 aa, Artificial Sequence
  HHDH variant
MSTAIVTNVKHFGGMGSALRLSEAGHTVACHDESFKHKDELEAFAETYPQLKPMSEQEPAELIEAVTSAFGHVDVLVSNDIFALEFRPIDKYAVEDYRGAVEALQIKPFALVNAVASQMKKRKSGHIIFITSAAPFGPWKELSTYSSARAGASALANALSKELGEYNIPVFAIGPNYLHSEDSPYYYPTEPWKINPEHVAHVKKVTALQRLGTQKELGELVAFLASGSCDYLTGQVFWLAGGFPAIERWPGMLE

SEQ ID NO: 289 - DNA, 768 bp, Artificial Sequence
  HHDH variant
  CDS (1)..(768)
atgagcaccgctattgtcaccaacgtcaaacattttggaggtatgggtagcgctctgaaactgagcgaagctggtcataccgtcgcttgccatgatgaaagctttaagcataaagatgaactggaagcttttgctgaagcctacccacagctgaaaccaatggccgaacaggaaccagctgaactgattgaagctgtcaccagcgcttttggtcatgtcgatgtcctggtcagcaacgatatctttgctctagaatttcgtccaatcgataaatacgctgtcgaggattacaggggtgctgtcgaagctctgcagatcaggccatttgctctagtgaatgctgtggctccacaaatgaagaagcgaaagtcggggcacatcatcttcatcacttcggctgccccgttcgggccatggaaggagctatcgacttactcttcggctcgagctggggctagtgcactagctaatgctctatcgaaggagctaggagagtacaatatcccggtgttcgctatcgggccgaattacctacactcggaggattcgccgtactattaccccactgagccgtggaagattaatccggagtatgtggctcacgtgaagaaggtgactgctctacgtcgactagggactcaaaaagagttgggggaattggtggcatttttggcatctggctcttgtgattatttgactggccaggtgttttggttggcaggcggctttcccgctatagaacgttggcccggcatgcccgaataatga

SEQ ID NO: 290 - protein, 254 aa, Artificial Sequence
  HHDH variant
MSTAIVTNVKHFGGMGSALKLSEAGHTVACHDESFKHKDELEAFAEAYPQLKPMAEQEPAELIEAVTSAFGHVDVLVSNDIFALEFRPIDKYAVEDYRGAVEALQIRPFALVNAVAPQMKKRKSGHIIFITSAAPFGPWKELSTYSSARAGASALANALSKELGEYNIPVFAIGPNYLHSEDSPYYYPTEPWKINPEYVAHVKKVTALRRLGTQKELGELVAFLASGSCDYLTGQVFWLAGGFPAIERWPGMPE

SEQ ID NO: 291 - DNA, 768 bp, Artificial Sequence
  HHDH variant
  CDS (1)..(768)
atgaacaccgctattgtcaccaacgtcaaacattttggaggtatgggtagcgctctgaaactgagcgaagctggtcataccgtcgcttgccatgatgaaagctttaagcataaagatgaactggaagcttttgctgaaacctacccacagctgaaaccaatggccgaacaggaaccagctgaactgattgaagctgtcaccagcgcttttggtcatgtcgatgtcctggtcagcaacgatatctttgctctagaatttcgtccaatcgataaatacgctgtcgaggattacaggggtgctgtcgaagctctgcagatcaggccatttgctctagtgaatgctgtggcttcgcaaatgaagaagcgaaagtcggggcacatcatcttcatcacttcggctgccccgttcgggccatggaaggagctatcgacttactcttcggctcgagctggggctagtgcactagctaatgctctatcgaaggagctaggagagtacaatatcccggtgttcgctatcgggccgaattacctacactcggaggattcgccgttctattaccccactgagccgtggaagattaatccggagtacgtggctcacgtgaagaaggtgactgctctacaacgactagggactcaaaaagagttgggggaattggtggcatttttggcatctggctcttgtgattatttgactggccaggtgttttggttggcaggcggctttcccgctatagaacgttggcccggcatgcccgaataatga

SEQ ID NO: 292 - protein, 254 aa, Artificial Sequence
  HHDH variant
MNTAIVTNVKHFGGMGSALKLSEAGHTVACHDESFKHKDELEAFAETYPQLKPMAEQEPAELIEAVTSAFGHVDVLVSNDIFALEFRPIDKYAVEDYRGAVEALQIRPFALVNAVASQMKKRKSGHIIFITSAAPFGPWKELSTYSSARAGASALANALSKELGEYNIPVFAIGPNYLHSEDSPFYYPTEPWKINPEYVAHVKKVTALQRLGTQKELGELVAFLASGSCDYLTGQVFWLAGGFPAIERWPGMPE

SEQ ID NO: 293 - DNA, 768 bp, Artificial Sequence
  HHDH variant
  CDS (1)..(768)
atgagcaccgttattgtcaccaacgtcaaacattttggaggtatgggtagcgctctgaggctgagcgaagctggtcataccgtcgcttgccatgatgaaagctttaagcataaagatgaactggaagcttttgctgaagcctacccacagctgaaaccactgagcgaacaggaaccagctgaactgattgaagctgtcaccagcgcttttggtcaggtcgatgtcctggtcagcaacgatatctttgctctagaatttcgtccaatcgataaatactcagtcgaggattacaggggtgctgtcgaagctctgcagatcaggccatttgctctagtgcattcggtggcttcgcaaatgaagaagcgaaagtcggggcacatcatcttcatcacttcggctgccccgttcgggccatggaaggagctatcgacttactcttcggctcgagctggggctagtgcactagctaatgctctatcgaaggagctaggagagtacaatatcccggtgttcgctatcgggccgaattacctacactcggaggattcgccgttctattaccccactgagccgtggaagattaatccggagcacgtggctcacgtgaagaaggtgactgctctacaacgactagggactcaaaaagagttgggggaattggtggcatttttggcatctggctcttgtgattatttgaccggccaggtgttttggttggcaggcggctttcccgctatagaacgttggcccggcatgctggaataatga

SEQ ID NO: 294 - protein, 254 aa, Artificial Sequence
  HHDH variant
MSTVIVTNVKHFGGMGSALRLSEAGHTVACHDESFKHKDELEAFAEAYPQLKPLSEQEPAELIEAVTSAFGQVDVLVSNDIFALEFRPIDKYSVEDYRGAVEALQIRPFALVHSVASQMKKRKSGHIIFITSAAPFGPWKELSTYSSARAGASALANALSKELGEYNIPVFAIGPNYLHSEDSPFYYPTEPWKINPEHVAHVKKVTALQRLGTQKELGELVAFLASGSCDYLTGQVFWLAGGFPAIERWPGMLE

SEQ ID NO: 295 - DNA, 768 bp, Artificial Sequence
  HHDH variant
  CDS (1)..(768)
atgaacaccgctattgtcaccaacgtcaaacattttggaggtatgggtagcgctctgaggctgagcgaagctggtcataccgtcgcttgccatgatgaaagctttaagcataaagatgaactggaagcttttgctgaagcctacccacagctgaaaccaatgagcgaacaggaaccagctgaactgattgaagctgtcaccagcgcttttggtcatgtcgatgtcctggtcagcaacgatatctttgctctagaatttcggccaatcgataaatactcagtcgaggattacaggggtgctgtcgaagctctgcagatcaggccatttgctctagtgaatgctgtggctccacaaatgaagaagcgaaagtcggggcacatcatcttcatcacttcggctgccccgttcgggccatggaaggagctatcgacttactcttcggctcgagctgggactagtgcactagctaatgctctatcgaaggagctaggagagtacaatatcccggtgttcgctatcgggccgaattacctacactcggaggattcgccgttctattaccccactgagccgtggaagattaatccggagcacgtggctcacgtgaagaaggtgactgctctacaacgactagggactcaaaaagagttgggggaattggtggcatttttggcatctggctcttgtgattatttgactggccaggtgttttggttggcaggcggctttcccgctatagaacgttggcccggcatgctggaataatga

SEQ ID NO: 296 - protein, 254 aa, Artificial Sequence
  HHDH variant
MNTAIVTNVKHFGGMGSALRLSEAGHTVACHDESFKHKDELEAFAEAYPQLKPMSEQEPAELIEAVTSAFGHVDVLVSNDIFALEFRPIDKYSVEDYRGAVEALQIRPFALVNAVAPQMKKRKSGHIIFITSAAPFGPWKELSTYSSARAGTSALANALSKELGEYNIPVFAIGPNYLHSEDSPFYYPTEPWKINPEHVAHVKKVTALQRLGTQKELGELVAFLASGSCDYLTGQVFWLAGGFPAIERWPGMLE

SEQ ID NO: 297 - DNA, 774 bp, Artificial Sequence
  HHDH variant
  CDS (1)..(774)
atgagcaccgctatcgtcaccaacgtcaaacattttggaggtatgggtagcgctctgaggctgagcgaagctggtcataccgtcgcttgccatgatgaaagctttaaacagaaagatgaactggaagcttttgctgaaacctacccacagctgaaaccaatgagcgaacaggaaccagctgacctgattgaagctgtcaccagcgcttacggtcaggtcgatgtcctggtcagcaacgatatctttgctccagaatttcagccaatcgataaatacgctgtcgaagattacaggggtgctgtcgaagctctgcagatcaggccatttgctctagtgaatgctgtggcttcgcaaatgaagaaacgaaagtcggggcacatcatcttcatcacttcggctactccgttcgggccatggaaagagctatcgacttacacttcggctcgagctggggcttgtactctagctaatgctctatcgaaggagctaggagagtacaatatcccggtgttcgctatcgggccgaattacctacactcggaggattcgccgtacttctacccgactgagccgtggaagactaatccggagcacgtggctcacgtgaagaaggtgactgctctacaacgactagggactcaaaaagagttgggggaattggtggcattcctggcatctggctcttgtgattatttgactggccaggtgttttggttggcaggcggctttcccataatagaacgttggcccggcatgcccgaataatgaggatcc

SEQ ID NO: 298 - protein, 254 aa, Artificial Sequence; identical to SEQ ID NO: 42
  HHDH variant

SEQ ID NO: 299 - DNA, 768 bp, Artificial Sequence
  HHDH variant
  CDS (1)..(768)
atgagcaccgctattgtcaccaacgtcaaacattttggaggtatgggtagcgctctgaggctgagcgaagctggtcataccgtcgcttgccatgatgaaagctttaagcataaagatgaactggaagcttttgctgaaacctacccacagctgaaaccaatgagcgaacaggaaccagctgaactgattgaagctgtcaccagcgcttttggtcaggtcgatgtcctggtcagcaacgatatctttgctctagaatttcggccaatcgataaatactcagtcgaggattacaggggtgctgtcgaagctctgcagatcaggccatttgctctagtgcatgctgtggcttcgcaaatgaagaagcgaaagtcggggcacatcatcttcatcacttcggctgccccgttcgggccatggaaggagctatcgacttactcttcggctcgagctggggctagtgcactagctaatgctctatcgaaggagctaggagagtacaatatcccggtgttcgctatcgggccgaattacctacactcggaggattcgccgtactattaccccactgagccgtggaagattaatccggagcacgtggctcacgtgaagaaggtgactgctctacaacgactagggactcaaaaagagttgggggaattggtggcatttttggcatctggctcttgtgattatttgactggccaggtgttttggttggcaggcggctttcccgtcatagaacgttggcccggcatgctggaataatga

SEQ ID NO: 300 - protein, 254 aa, Artificial Sequence
  HHDH variant
MSTAIVTNVKHFGGMGSALRLSEAGHTVACHDESFKHKDELEAFAETYPQLKPMSEQEPAELIEAVTSAFGQVDVLVSNDIFALEFRPIDKYSVEDYRGAVEALQIRPFALVHAVASQMKKRKSGHIIFITSAAPFGPWKELSTYSSARAGASALANALSKELGEYNIPVFAIGPNYLHSEDSPYYYPTEPWKINPEHVAHVKKVTALQRLGTQKELGELVAFLASGSCDYLTGQVFWLAGGFPVIERWPGMLE

SEQ ID NO: 301 - DNA, 768 bp, Artificial Sequence
  HHDH variant
  CDS (1)..(768)
atgagcaccgctattgtcaccaacgtcaaacattttggaggtatgggtagcgctctgaggctgagcgaagctggtcataccgtcgcttgccatgatgaaagctttaagcataaagatgaactggaagcttttgctgaaacctacccacagctgaaaccaatgagcgaacaggaaccagctgaactgattgaagctgtcaccagcgcttttggtcaggtcgatgtcctggtcagcaacgatatctttgctctagaatttcggccaatcgataaatacgctgtcgaggattacaggggtgctgtcgaagctctgcagatcaggccatttgctctagtgcatgctgtggcttcgcaaatgaagaagcgaaagtcggggcacatcatcttcatcacttcggctgccccgttcgggccatggaaggagctatcgacttactcttcggctcgagctggggctagtgcactagctaatgctctatcgaaggagctaggagagtacaatatcccggtgttcgctatcgggccgaattacctacactcggaggattcgccgtactattaccccactgagccgtggaagattaatccggagcacgtggctcacgtgaagaaggtgactgctctacaacgactagggactcaaaaagagttgggggaattggtggcatttttggcatctggctcttgtgattatttgactggccaggtgttttggttggcaggcggctttcccgtcatagaacgttggcccggcatgcccgaataatga

SEQ ID NO: 302 - protein, 254 aa, Artificial Sequence
  HHDH variant
MSTAIVTNVKHFGGMGSALRLSEAGHTVACHDESFKHKDELEAFAETYPQLKPMSEQEPAELIEAVTSAFGQVDVLVSNDIFALEFRPIDKYAVEDYRGAVEALQIRPFALVHAVASQMKKRKSGHIIFITSAAPFGPWKELSTYSSARAGASALANALSKELGEYNIPVFAIGPNYLHSEDSPYYYPTEPWKINPEHVAHVKKVTALQRLGTQKELGELVAFLASGSCDYLTGQVFWLAGGFPVIERWPGMPE

SEQ ID NO: 303 - DNA, 768 bp, Artificial Sequence
  HHDH variant
  CDS (1)..(768)
atgagcaccgctattgtcaccaacgtcaaacattttggaggtatgggtagcgctctgaggctgagcgaagctggtcataccgtcgcttgccatgatgaaagctttaagcataaagatgaactggaagcttttgctgaagcctacccacagctgaaaccaatgagcgaacaggaaccagctgaactgattgaagctgtcaccagcgcttttggtcatgtcgatgtcctggtcagcaacgatatctttgctctagaatttcggccaatcgataaatacgctgtcgagaactacaggggtgctgtcgaagctctgcagatccgcccatttgctctagtgaatgctgtggctccacaaatgaagaagcgaaagtcggggcacatcatcttcatcacttcggctgccccgttcgggccatggaaggagctatcgacttactcttcggctcgagctggggctagtgcactagctaatgctctatcgaaggagctaggagagtacaatatcccggtgttcgctatcgggccgaattacctacactcggaggattcgccgttctattaccccactgagccgtggaagattaatccggagcacgtggctcacgtgaagaaggtgactgctctacaacgactagggactcaaaaagagttgggggaattggtggcatttttggcatctggctcttgtgattatttgactggccaggtgttttggctggcaggcggctttcccgtcatagaacgttggcccggcatgcccgaataatga

SEQ ID NO: 304 - protein, 254 aa, Artificial Sequence
  HHDH variant
MSTAIVTNVKHFGGMGSALRLSEAGHTVACHDESFKHKDELEAFAEAYPQLKPMSEQEPAELIEAVTSAFGHVDVLVSNDIFALEFRPIDKYAVENYRGAVEALQIRPFALVNAVAPQMKKRKSGHIIFITSAAPFGPWKELSTYSSARAGASALANALSKELGEYNIPVFAIGPNYLHSEDSPFYYPTEPWKINPEHVAHVKKVTALQRLGTQKELGELVAFLASGSCDYLTGQVFWLAGGFPVIERWPGMPE

SEQ ID NO: 305 - DNA, 768 bp, Artificial Sequence
  HHDH variant
  CDS (1)..(768)
atgagcaccgctattgtcaccaacgtcaaacattttggaggtatgggtagcgctctgaggctgagcgaagctggtcataccgtcgcttgccatgatgaaagctttaagcataaagatgaactggaagcttttgctgaagcctacccacagctgaaaccaatggccgaacaggaaccagctgaactgattgaagctgtcaccagcgcttttggtcaggtcgatgtcctggtcagcaacgatatctttgctctagaatttcggccaatcgataaatacgctgtcgaggattacaggggtgctgtcgaagctctgcagatcaggccatttgctctagtgaatgctgtggctccacaaatgaagaagcgaaagtcggggcacatcatcttcatcacttcggctgccccgttcgggccatggaaggagctatcgacttactcttcggctcgagctggggctagtgcactagctaatgctctatcgaaggagctaggagagtacaatatcccggtgttcgctatcgggccgaattacctacactcggaggattcgccgttctattaccccactgagccgtggaagattaatccggagcacgtggctcacgtgaagaaggtgactgctctacaacgactagggactcaaaaagagttgggggaattggtggcatttttggcatctggctcttgtgattatttgactggccaggtgttttggttggcaggcggctttcccgtcatagaacgttggcccggcatgcccgaataatga

SEQ ID NO: 306 - protein, 254 aa, Artificial Sequence
  HHDH variant
MSTAIVTNVKHFGGMGSALRLSEAGHTVACHDESFKHKDELEAFAEAYPQLKPMAEQEPAELIEAVTSAFGQVDVLVSNDIFALEFRPIDKYAVEDYRGAVEALQIRPFALVNAVAPQMKKRKSGHIIFITSAAPFGPWKELSTYSSARAGASALANALSKELGEYNIPVFAIGPNYLHSEDSPFYYPTEPWKINPEHVAHVKKVTALQRLGTQKELGELVAFLASGSCDYLTGQVFWLAGGFPVIERWPGMPE

SEQ ID NO: 307 - DNA, 768 bp, Artificial Sequence
  HHDH variant
  CDS (1)..(768)
atgagcaccgctattgtcaccaacgtcaaacattttggaggtatgggtagcgctctgaggctgagcgaagctggtcataccgtcgcttgccatgatgaaagctttaagcataaagatgaactggaagcttttgctgaagcctacccacagctgaaaccaatgagcgaacaggaaccagctgaactgattgaagctgtcaccagcgcttttggtcaggtcgatgtcctggtcagcaacgatatctttgctctagaatttcggccaatcgataaatacgctgtcgaggattacaggggtgctgtcgaagctctgcagatcaagccatttgctctagtgaatgctgtggcttcgcaaatgaagaagcgaaagtcggggcacatcatcttcatcacttcggctgccccgttcgggccatggaaggagctatcgacttactcttcggctcgagctgggactagtgcactagctaatgctctatcgaaggagctaggagagtacaatatcccggtgttcgctatcgggccgaattacctacactcggaggattcgccgtactattaccccactgagccgtggaagattaatccggagcacgtggctcacgtgaagaaggtgactgctctacaacgactagggactcaaaaagagttgggggaattggtggcatttttggcatctggctcttgtgattatttgactggccaggtgttttggttggcaggcggctttcccgctatagaacgttggcccggcatgcccgaataatga

SEQ ID NO: 308 - protein, 254 aa, Artificial Sequence
  HHDH variant
MSTAIVTNVKHFGGMGSALRLSEAGHTVACHDESFKHKDELEAFAEAYPQLKPMSEQEPAELIEAVTSAFGQVDVLVSNDIFALEFRPIDKYAVEDYRGAVEALQIKPFALVNAVASQMKKRKSGHIIFITSAAPFGPWKELSTYSSARAGTSALANALSKELGEYNIPVFAIGPNYLHSEDSPYYYPTEPWKINPEHVAHVKKVTALQRLGTQKELGELVAFLASGSCDYLTGQVFWLAGGFPAIERWPGMPE

SEQ ID NO: 309 - DNA, 768 bp, Artificial Sequence
  HHDH variant
  CDS (1)..(768)
atgagcaccgctattgtcaccaacgtcaaacattttggaggtatgggtagcgctctgaggctgagcgaagctggtcataccgtcgcttgccatgatgaaagctttaagcataaagatgaactggaagcttttgctgaaacctacccacagctgaaaccaatgagcgaacaggaaccagctgaactgattgaagctgtcaccagcgcttttggtcatgtcgatgtcctggtcagcaacgatatctttgctctagaatttcggccaatcgataaatacgctgtcgaggattacaggggtgctgtcgaagctctgcagatcaggccatttgctctagtgaatgctgtggcttcgcaaatgaagaagcgaaagtcggggcacatcatcttcatcacttcggctgccccgttcgggccatggaaggagctatcgacttactcttcggctcgagctggggctagtgcactagctaatgctctatcgaaggagctaggagagtacaatatcccggtgttcgctatcgggccgaattacctacactcggaggattcgccgtactattaccccactgagccgtggaagattaatccggagcacgtggctcacgtgaagaaggtgactgctctacaacgactagggactcaaaaagagttgggggaattggtggcatttttggcatctggctcttgtgattatttgactggccaggtgttttggttggcaggcggctttcccgtcatagaacgttggcccggcatgcccgaataatga

SEQ ID NO: 310 - protein, 254 aa, Artificial Sequence
  HHDH variant
MSTAIVTNVKHFGGMGSALRLSEAGHTVACHDESFKHKDELEAFAETYPQLKPMSEQEPAELIEAVTSAFGHVDVLVSNDIFALEFRPIDKYAVEDYRGAVEALQIRPFALVNAVASQMKKRKSGHIIFITSAAPFGPWKELSTYSSARAGASALANALSKELGEYNIPVFAIGPNYLHSEDSPYYYPTEPWKINPEHVAHVKKVTALQRLGTQKELGELVAFLASGSCDYLTGQVFWLAGGFPVIERWPGMPE

SEQ ID NO: 311 - DNA, 768 bp, Artificial Sequence
  HHDH variant
  CDS (1)..(768)
atgagcaccgctattgtcaccaacgtcaaacattttggaggtatgggtagcgctctgaggctgagcgaagctggtcataccgtcgcttgccatgatgaaagctttaagcataaagatgaactggaagcttttgctgaaacctacccacagctgaaaccactgaccgaacaggaaccagctgaactgattgaagctgtcaccagcgcttttggtcaggtcgatgtcctggtcagcaacgatatctttgctctagaatttcggccaatcgataaatacgctgtcgaggattacaggggtgctgtcgaagctctgcagatcaggccatttgctctagtgaatgctgtggcttcgcaaatgaagaagcgaaagtcggggcacatcatcttcatcacttcggctgccccgttcgggccatggaaggagctatcgacttactcttcggctcgagctggggctagtgcactagctaatgctctatcgaaggagctaggagagtacaatatcccggtgttcgctatcgggccgaattacctacactcggaggattcgccgtactattaccccactgagccgtggaagattaatccggagcacgtggctcacgtgaagaaggtgactgctctacaacgactagggactcaaaaagagttgggggaattggtggcatttttggcatctggctcttgtgattatttgactggccaggtgttttggttggcaggcggctttcccgtcatagaacgttggcccggcatgcccgaataatga

SEQ ID NO: 312 - protein, 254 aa, Artificial Sequence
  HHDH variant
MSTAIVTNVKHFGGMGSALRLSEAGHTVACHDESFKHKDELEAFAETYPQLKPLTEQEPAELIEAVTSAFGQVDVLVSNDIFALEFRPIDKYAVEDYRGAVEALQIRPFALVNAVASQMKKRKSGHIIFITSAAPFGPWKELSTYSSARAGASALANALSKELGEYNIPVFAIGPNYLHSEDSPYYYPTEPWKINPEHVAHVKKVTALQRLGTQKELGELVAFLASGSCDYLTGQVFWLAGGFPVIERWPGMPE

SEQ ID NO: 313 - DNA, 768 bp, Artificial Sequence
  HHDH variant
  CDS (1)..(768)
atgagcaccgctattgtcaccaacgtcaaacattttggaggtatgggtagcgctctgaaactgagcgaagttggtcataccgtcgcttgccatgatgaaagctttaagcataaagatgaactggaagcttttgctgaaacctacccacagctgaaaccactggccgaacaggaaccagctgaactgattgaagctgtcaccagcgcttttggtcatgtcgatgtcctggtcagcaacgatatctttgctctagaatttcggccaatcgataaatacgctgtcgaggattacaggggtgctgtcgaagctctgcagatcaggccatttgctctagtgaatgctgtggcttcgcaaatgaagaagcgaaagtcggggcacatcatcttcatcacttcggctgccccgttcgggccatggaaggagctatcgacttactcttcggctcgagctggggctagtgcactagctaatgctctatcgaaggagctaggagagtacaatatcccggtgttcgctatcgggccgaattacctacactcggaggattcgccgtactattaccccactgagccgtggaagattaatccggagcacgtggctcacgtgaagaaggtgactgctctacaacgactagggactcaaaaagagttgggggaattggtggcatttttggcatctggctcttgtgattatttgactggccaggtgttttggttggcaggcggctttcccgtcatagaacgttggcccggcatgcccgaataatga

SEQ ID NO: 314 - protein, 254 aa, Artificial Sequence
  HHDH variant
MSTAIVTNVKHFGGMGSALKLSEVGHTVACHDESFKHKDELEAFAETYPQLKPLAEQEPAELIEAVTSAFGHVDVLVSNDIFALEFRPIDKYAVEDYRGAVEALQIRPFALVNAVASQMKKRKSGHIIFITSAAPFGPWKELSTYSSARAGASALANALSKELGEYNIPVFAIGPNYLHSEDSPYYYPTEPWKINPEHVAHVKKVTALQRLGTQKELGELVAFLASGSCDYLTGQVFWLAGGFPVIERWPGMPE

SEQ ID NO: 315 - DNA, 768 bp, Artificial Sequence; identical to SEQ ID NO: 281
  HHDH variant
  CDS (1)..(768)

SEQ ID NO: 316 - protein, 254 aa, Artificial Sequence; identical to SEQ ID NO: 282
  HHDH variant

SEQ ID NO: 317 - DNA, 768 bp, Artificial Sequence; identical to SEQ ID NO: 237
  HHDH variant
  CDS (1)..(768)

SEQ ID NO: 318 - protein, 254 aa, Artificial Sequence; identical to SEQ ID NO: 238
  HHDH variant

SEQ ID NO: 319 - DNA, 768 bp, Artificial Sequence
  HHDH variant
  CDS (1)..(768)
atgagcaccgctattgtcaccaacgtcaaacattttggaggtatgggtagcgctctgaggctgagcgaagctggtcataccgtcgcttgccatgatgaaagctttaagcataaagatgaactggaagcttttgctgaaacctacccacagctgaaaccaatgagcgaacaggaaccagctgaactgattgaagctgtcaccagcgcttttggtcaggtcgatgtcctggtcagcaacgatatctttgctctagaatttcgtccaatcgataaatacgctgtcgaggattacaggggtgctgtcgaagctctgcagatcaggccatttgctctagtgaatgctgtggcttcgcaaatgaagaagcgaaagtcggggcacatcatcttcatcacttcggctgccccgttcgggccatggaaggagctatcgacttactcttcggctcgagctggggctagtgcactagctaatgctctatcgaaggagctaggagagtacaatatcccggtgttcgctatcgggccgaattacctacactcggaggattcgccgtactattaccccactgagccgtggaagattaatccggagcacgtggctcacgtgaagaaggtgactgctctacaacgactagggactcaaaaagagttgggggaattggtggcatttttggcatctggctcttgtgattatttgactggccaggtgttttggttggcaggcggctctcccgtcatagaacgttggcccggcatgctggaataatga

SEQ ID NO: 320 - protein, 254 aa, Artificial Sequence
  HHDH variant
MSTAIVTNVKHFGGMGSALRLSEAGHTVACHDESFKHKDELEAFAETYPQLKPMSEQEPAELIEAVTSAFGQVDVLVSNDIFALEFRPIDKYAVEDYRGAVEALQIRPFALVNAVASQMKKRKSGHIIFITSAAPFGPWKELSTYSSARAGASALANALSKELGEYNIPVFAIGPNYLHSEDSPYYYPTEPWKINPEHVAHVKKVTALQRLGTQKELGELVAFLASGSCDYLTGQVFWLAGGSPVIERWPGMLE

SEQ ID NO: 321 - DNA, 768 bp, Artificial Sequence
  HHDH variant
  HHDH (1)..(768)
  CDS (1)..(768)
atgagcaccgctattgtcaccaacgtcaaacattttggaggtatgggtagcgctctgaaactgagcgaagctggtcataccgtcgcttgccatgatgaaagctttaagcataaagatgaactggaagcttttgctgaaacctacccacagctgaaaccactggccgaacaggaaccagctgaactgattgaagctgtcaccagcgcttttggtcaggtcgatgtcctggtcagcaacgatatctttgctctagaatttcggccaatcgataaatactcagtcgaggattacaggggtgctgtcgaagctctgcagatcaggccatttgctctagtgaatgctgtggcttcgcaaatgaagaagcgaaagtcggggcacatcatcttcatcacttcggctgccccgttcgggccatggaaggagctatcgacttactcttcggctcgagctggggctagtgcactagctaatgctctatcgaaggagctaggagagtacaatatcccggtgttcgctatcgggccgaattacctacactcggaggattcgccgtactattaccccactgagccgtgggagattaatccggagtatgtggctcacgtgaagaaggtgactgctctacgtcgactagggactcaaaaagagttgggggaattggtggcatttttggcatctggctcttgtgattatttgactggccaggtgttttggttggcaggcggctttcccgtcatagaacgttggcccggcatgcccgaataatga

SEQ ID NO: 322 - protein, 254 aa, Artificial Sequence
  HHDH variant
MSTAIVTNVKHFGGMGSALKLSEAGHTVACHDESFKHKDELEAFAETYPQLKPLAEQEPAELIEAVTSAFGQVDVLVSNDIFALEFRPIDKYSVEDYRGAVEALQIRPFALVNAVASQMKKRKSGHIIFITSAAPFGPWKELSTYSSARAGASALANALSKELGEYNIPVFAIGPNYLHSEDSPYYYPTEPWEINPEYVAHVKKVTALRRLGTQKELGELVAFLASGSCDYLTGQVFWLAGGFPVIERWPGMPE

SEQ ID NO: 323 - DNA, 768 bp, Artificial Sequence; identical to SEQ ID NO: 189
  HHDH variant
  CDS (1)..(768)

SEQ ID NO: 324 - protein, 254 aa, Artificial Sequence; identical to SEQ ID NO: 190
  HHDH variant

SEQ ID NO: 325 - DNA, 768 bp, Artificial Sequence; identical to SEQ ID NO: 191
  HHDH variant
  CDS (1)..(768)

SEQ ID NO: 326 - protein, 254 aa, Artificial Sequence; identical to SEQ ID NO: 192
  HHDH variant

SEQ ID NO: 327 - DNA, 768 bp, Artificial Sequence
  HHDH variant
  CDS (1)..(768)
atgagcaccgctattgtcaccaacgtcaaacattttggaggtatgggtagcgctctgaggctgagcgaagctggtcataccgtcgcttgccatgatgaaagctttaagcataaagatgaactggaagcttttgctgaagcctacccacagctgaaaccaatgagcgaacaggaaccagctgaactgattgaagctgtcaccagcgcttttggtcaggtcgatgtcctggtcagcaacgatatctttgctctagaatttcggccaatcgataaatacgctgtcgaggattacaggggtgctgtcgaagctctgcagatccgcccatttgctctagtgaatgctgtggcttcgcaaatgaagaagcgaaagtcggggcacatcatcttcatcacttcggctgccccgttcgggccatggaaggagctatcgacttactcttcggctcgagctggggctagtgcactagctaatgctctatcgaaggagctaggagagtacaatatcccggtgttcgctatcgggccgaattacctacactcggaggattcgccgttctattaccccactgagccgtggaagattaatccggagcacgtggctcacgtgaagaaggtgactgctctacaacgactagggactcaaaaagagttgggggaattggtggcatttttggcatctggctcttgtgattatttgactggccaggtgttttggttggcaggcggctttcccgctatagaacgttggcccggcatgcccgaataatga

SEQ ID NO: 328 - protein, 254 aa, Artificial Sequence
  HHDH variant
MSTAIVTNVKHFGGMGSALRLSEAGHTVACHDESFKHKDELEAFAEAYPQLKPMSEQEPAELIEAVTSAFGQVDVLVSNDIFALEFRPIDKYAVEDYRGAVEALQIRPFALVNAVASQMKKRKSGHIIFITSAAPFGPWKELSTYSSARAGASALANALSKELGEYNIPVFAIGPNYLHSEDSPFYYPTEPWKINPEHVAHVKKVTALQRLGTQKELGELVAFLASGSCDYLTGQVFWLAGGFPAIERWPGMPE

SEQ ID NO: 329 - DNA, 768 bp, Artificial Sequence
  HHDH variant
  CDS (1)..(768)
atgagcaccgctattgtcaccaacgtcaaacattttggaggtatgggtagcgctctgaaactgagcgaagctggtcataccgtcgcttgccatgatggtagctttaagcataaagatgaactggaagcttttgctgaagcctacccacagctgaaaccaatggccgaacaggaaccagctgaactgattgaagctgtcaccagcgcttttggtcatgtcgatgtcctggtcagcaacgatatctttgctctagaatttcggccaatcgataaatactcagtcgaggattacaggggtgctgtcgaagctctgcagatcaggccatttgctctagtgcatgctgtggcttcgcaaatgaagaagcgaaagtcggggcacatcatcttcatcacttcggctgccccgttcgggccatggaaggagctatcgacttactcttcggctcgagctgggactagtgcactagctaatgctctatcgaaggagctaggagagtacaatatcccggtgttcgctatcgggccgaattacctacactcggaggattcgccgttctattaccccactgagccgtggaagattaatccggagcacgtggctcacgtgaagaaggtgactgctctacaacgactagggactcaaaaagagttgggggaattggtggcatttttggcatctggctcttgtgattatttgactggccaggtgttttggttggcaggcggctttcccgtcatagaacgttggcccggcatgcccgaataatga

SEQ ID NO: 330 - protein, 254 aa, Artificial Sequence
  HHDH variant
MSTAIVTNVKHFGGMGSALKLSEAGHTVACHDGSFKHKDELEAFAEAYPQLKPMAEQEPAELIEAVTSAFGHVDVLVSNDIFALEFRPIDKYSVEDYRGAVEALQIRPFALVHAVASQMKKRKSGHIIFITSAAPFGPWKELSTYSSARAGTSALANALSKELGEYNIPVFAIGPNYLHSEDSPFYYPTEPWKINPEHVAHVKKVTALQRLGTQKELGELVAFLASGSCDYLTGQVFWLAGGFPVIERWPGMPE

SEQ ID NO: 331 - DNA, 768 bp, Artificial Sequence
  HHDH variant
  CDS (1)..(768)
atgagcaccgctattgtcaccaacgtcaaacattttggaggtatgggtagcgctctgaggctgagcgaagctggtcataccgtcgcttgccatgatgaaagctttaagcataaagatgaactggaagcttttgctgaaacctacccacagctgaaaccactggccgaacaggaaccagctgaactgattgaagctgtcaccagcgcttttggtcaggtcgatgtcctggtcagcaacgatatctttgctctagaatttcggccaatcgataaatacgctgtcgaggattacaggggtgctgtcgaagctctgcagatccgcccatttgctctagtgaatgctgtggctccacaaatgaagaagcgaaagtcggggcacatcatcttcatcacttcggctgccccgttcgggccatggaaggagctatcgacttactcttcggctcgagctggggctagtgcactagctaatgctctatcgaaggagctaggagagtacaatatcccggtgttcgctatcgggccgaattacctacactcggaggattcgccgttctattaccccactgagccgtggaagattaatccggagcacgtggctcacgtgaagaaggtgactgctctacgtcgactagggactcaaaaagagttgggggaattggtggcatttttggcatctggctcttgtgattatttgactggccaggtgttttggttggcaggcggctttcccgtcatagaacgttggcccggcatgcccgaataatga

SEQ ID NO: 332 - protein, 254 aa, Artificial Sequence
  HHDH variant
MSTAIVTNVKHFGGMGSALRLSEAGHTVACHDESFKHKDELEAFAETYPQLKPLAEQEPAELIEAVTSAFGQVDVLVSNDIFALEFRPIDKYAVEDYRGAVEALQIRPFALVNAVAPQMKKRKSGHIIFITSAAPFGPWKELSTYSSARAGASALANALSKELGEYNIPVFAIGPNYLHSEDSPFYYPTEPWKINPEHVAHVKKVTALRRLGTQKELGELVAFLASGSCDYLTGQVFWLAGGFPVIERWPGMPE

SEQ ID NO: 333 - DNA, 768 bp, Artificial Sequence
  HHDH variant
  CDS (1)..(768)
atgagcaccgctattgtcaccaacgtcaaacattttggaggtatgggtagcgctctgaaactgagcgaagctggtcataccgtcgcttgccatgatgaaagctttaagcataaagatgaactggaagcttttgctgaaacctacccacagctgaaaccactgagcgaacaggaaccagctgaactgattgaagctgtcaccagcgcttttggtcaggtcgatgtcctggtcagcaacgatatctttgctctagaatttcggccaatcgataaatacgctgtcgaggattacaggggtgctgtcgaagctctgcagatcaggccatttgctctagtgaatgctgtggcttcgcaaatgaagaagcgaaagtcggggcacatcatcttcatcacttcggctgccccgttcgggccatggaaggagctatcgacttactcttcggctcgagctggggctagtgcactagctaatgctctatcgaaggagctaggagagtacaatatcccggtgttcgctatcgggccgaattacctacactcggaggattcgccgtactattaccccactgagccgtggaagattaatccggagcacgtggctcacgtgaagaaggtgactgctctacaacgactagggactcaaaaagagttgggggaattggtggcatttttggcatctggctcttgtgattatttgactggccaggtgttttggttggcaggcggctttcccgtcatagaacgttggcccggcatgcccgaataatga

SEQ ID NO: 334 - protein, 254 aa, Artificial Sequence
  HHDH variant
MSTAIVTNVKHFGGMGSALKLSEAGHTVACHDESFKHKDELEAFAETYPQLKPLSEQEPAELIEAVTSAFGQVDVLVSNDIFALEFRPIDKYAVEDYRGAVEALQIRPFALVNAVASQMKKRKSGHIIFITSAAPFGPWKELSTYSSARAGASALANALSKELGEYNIPVFAIGPNYLHSEDSPYYYPTEPWKINPEHVAHVKKVTALQRLGTQKELGELVAFLASGSCDYLTGQVFWLAGGFPVIERWPGMPE

SEQ ID NO: 335 - DNA, 768 bp, Artificial Sequence
  HHDH variant
  CDS (1)..(768)
atgagcaccgctattgtcaccaacgtcaaacattttggaggtatgggtagcgctctgaaactgagcgaagctggtcataccgtcgcttgccatgatgaaagctttaagcataaagatgaactggaagcttttgctgaaacctacccacagctgaaaccaatgagcgaacaggaaccagctgaactgattgaagctgtcaccagcgcttttggtcaggtcgatgtcctggtcagcaacgatatctttgctctagaatttcggccaatcgataaatacgctgtcgaggattacaggggtgctgtcgaagctctgcagatcaggccatttgctctagtgcatgctgtggctccacaaatgaagaagcgaaagtcggggcacatcatcttcatcacttcggctgccccgttcgggccatggaaggagctatcgacttactcttcggctcgagctgggactagtgcactagctaatgctctatcgaaggagctaggagagtacaatatcccggtgttcgctatcgggccgaattacctacactcggaggattcgccgttctattaccccactgagccgtggaagattaatccggagcacgtggctcacgtgaagaaggtgactgctctacgtcgactagggactcaaaaagagttgggggaattggtggcatttttggcatctggctcttgtgattatttgactggccaggtgttttggttggcaggcggctttcccgctatagaacgttggcccggcatgctggaataatga

SEQ ID NO: 336 - protein, 254 aa, Artificial Sequence
  HHDH variant
MSTAIVTNVKHFGGMGSALKLSEAGHTVACHDESFKHKDELEAFAETYPQLKPMSEQEPAELIEAVTSAFGQVDVLVSNDIFALEFRPIDKYAVEDYRGAVEALQIRPFALVHAVAPQMKKRKSGHIIFITSAAPFGPWKELSTYSSARAGTSALANALSKELGEYNIPVFAIGPNYLHSEDSPFYYPTEPWKINPEHVAHVKKVTALRRLGTQKELGELVAFLASGSCDYLTGQVFWLAGGFPAIERWPGMLE

SEQ ID NO: 337 - DNA, 768 bp, Artificial Sequence
  HHDH variant
  CDS (1)..(768)
atgagcaccgctattgtcaccaacgtcaaacattttggaggtatgggtagcgctctgaaactgagcgaagctggtcataccgtcgcttgccatgatggtagctttaagcataaagatgaactggaagcttttgctgaaacctacccacagctgaaaccaatgagcgaacaggaaccagctgaactgattgaagctgtcaccagcgcttttggtcaggtcgatgtcctggtcagcaacgatatctttgctctagaatttcggccaatcgataaatactcagtcgagaactacaggggtgctgtcgaagctctgcagatcaggccatttgctctagtgaatgctgtggcttcgcaaatgaagaagcgaaagtcggggcacatcatcttcatcacttcggctgccccgttcgggccatggaaggagctatcgacttactcttcggctcgagctgggactagtgcactagctaatgctctatcgaaggagctaggagagtacaatatcccggtgttcgctatcgggccgaattacctacactcggaggattcgccgtactattaccccactgagccgtggaagattaatccggagcacgtggctcacgtgaagaaggtgactgctctacaacgactagggactcaaaaagagttgggggaattggtggcatttttggcatctggctcttgtgattatttgactggccaggtgttttggttggcaggcggctttcccgctatagaacgttggcccggcatgcccgaataatga

SEQ ID NO: 338 - protein, 254 aa, Artificial Sequence
  HHDH variant
MSTAIVTNVKHFGGMGSALKLSEAGHTVACHDGSFKHKDELEAFAETYPQLKPMSEQEPAELIEAVTSAFGQVDVLVSNDIFALEFRPIDKYSVENYRGAVEALQIRPFALVNAVASQMKKRKSGHIIFITSAAPFGPWKELSTYSSARAGTSALANALSKELGEYNIPVFAIGPNYLHSEDSPYYYPTEPWKINPEHVAHVKKVTALQRLGTQKELGELVAFLASGSCDYLTGQVFWLAGGFPAIERWPGMPE

SEQ ID NO: 339 - DNA, 768 bp, Artificial Sequence
  HHDH variant
  CDS (1)..(768)
atgagcaccgctattgtcaccaacgtcaaacattttggaggtatgggtagcgctctgaggctgagcgaagctggtcataccgtcgcttgccatgatgaaagctttaagcataaagatgaactggaagcttttgctgaagcctacccacagctgaaaccactggccgaacaggaaccagctgaactgattgaagctgtcaccagcgcttttggtcatgtcgatgtcctggtcagcaacgatatctttgctctagaatttcggccaatcgataaatacgctgtcgaggattacaggggtgctgtcgaagctctgcagatccgcccatttgctctagtgaatgctgtggcttcgcaaatgaagaagcgaaagtcggggcacatcatcttcatcacttcggctgccccgttcgggccatggaaggagctatcgacttactcttcggctcgagctggaactagtgcactagctaatgctctagctaaggagctaggagagtacaatatcccggtgttcgctatcgggccgaattacctacactcggaggattcgccgtactattaccccactgagccgtggaagattaatccggagcacgtggctcacgtgaagaaggtgactgctctacgtcgactagggactcaaaaagagttgggggaattggtggcatttttggcatctggctcttgtgattatttgactggccaggtgttttggttggcaggcggctttcccgtcatagaacgttggcccggcatgctggaataatga

SEQ ID NO: 340 - protein, 254 aa, Artificial Sequence
  HHDH variant
MSTAIVTNVKHFGGMGSALRLSEAGHTVACHDESFKHKDELEAFAEAYPQLKPLAEQEPAELIEAVTSAFGHVDVLVSNDIFALEFRPIDKYAVEDYRGAVEALQIRPFALVNAVASQMKKRKSGHIIFITSAAPFGPWKELSTYSSARAGTSALANALAKELGEYNIPVFAIGPNYLHSEDSPYYYPTEPWKINPEHVAHVKKVTALRRLGTQKELGELVAFLASGSCDYLTGQVFWLAGGFPVIERWPGMLE

SEQ ID NO: 341 - DNA, 768 bp, Artificial Sequence
  HHDH variant
  CDS (1)..(768)
atgagcaccgctattgtcaccaacgtcaaacattttggaggtatgggtagcgctctgaaactgagcgaagctggtcataccgtcgcttgccatgatggtagctttaagcataaagatgaactggaagcttttgctgaagcctacccacagctgaaaccaatgagcgaacaggaaccagctgaactgattgaagctgtcaccagcgcttttggtcaggtcgatgtcctggtcagcaacgatatctttgctctagaatttcggccaatcgataaatacgctgtcgaggattacaggggtgctgtcgaagctctgcagatccgcccatttgctctagtgaatgctgtggcttcgcaaatgaagaagcgaaagtcggggcacatcatcttcatcacttcggctgccccgttcgggccatggaaggagctatcgacttactcttcggctcgagctgggactagtgcactagctaatgctctatcgaaggagctaggagagtacaatatcccggtgttcgctatcgggccgaattacctacactcggaggattcgccgttctattaccccactgagccgtggaagattaatccggagcacgtggctcacgtgaagaaggtgactgctctacgtcgactagggactcaaaaagagttgggggaattggtggcatttttggcatctggctcttgtgattatttgactggccaggtgttttggttggcaggcggctttcccgctatagaacgttggcccggcatgcccgaataatga

SEQ ID NO: 342 - protein, 254 aa, Artificial Sequence
  HHDH variant
MSTAIVTNVKHFGGMGSALKLSEAGHTVACHDGSFKHKDELEAFAEAYPQLKPMSEQEPAELIEAVTSAFGQVDVLVSNDIFALEFRPIDKYAVEDYRGAVEALQIRPFALVNAVASQMKKRKSGHIIFITSAAPFGPWKELSTYSSARAGTSALANALSKELGEYNIPVFAIGPNYLHSEDSPFYYPTEPWKINPEHVAHVKKVTALRRLGTQKELGELVAFLASGSCDYLTGQVFWLAGGFPAIERWPGMPE

SEQ ID NO: 343 - DNA, 768 bp, Artificial Sequence
  HHDH variant
  CDS (1)..(768)
atgagcaccgctattgtcaccaacgtcaaacattttggaggtatgggtagcgctctgaggctgagcgaagctggtcataccgtcgcttgccatgatgaaagctttaagcataaagatgaactggaagcttttgctgaagcctacccacagctgaaaccaatgagcgaacaggaaccagctgaactgattgaagctgtcaccagcgcttttggtcaggtcgatgtcctggtcagcaacgatatctttgctctagaatttcggccaatcgataaatacgctgtcgaggattacaggggtgctgtcgaagctctgcagatccgcccatttgctctagtgaatgctgtggcttcgcaaatgaagaagcgaaagtcggggcacatcatcttcatcacttcggctgccccgttcgggccatggaaggagctatcgacttactcttcggctcgagctgggactagtgcactagctaatgctctagctaaggagctaggagagtacaatatcccggtgttcgctatcgggccgaattacctacactcggaggattcgccgttctattaccccactgagccgtggaagattaatccggagtatgtggctcacgtgaagaaggtgactgctctacaacgactagggactcaaaaagagttgggggaattggtggcatttttggcatctggctcttgtgattatttgactggccaggtgttttggttggcaggcggctttcccgctatagaacgttggcccggcatgcccgaataatga

SEQ ID NO: 344 - protein, 254 aa, Artificial Sequence
  HHDH variant
MSTAIVTNVKHFGGMGSALRLSEAGHTVACHDESFKHKDELEAFAEAYPQLKPMSEQEPAELIEAVTSAFGQVDVLVSNDIFALEFRPIDKYAVEDYRGAVEALQIRPFALVNAVASQMKKRKSGHIIFITSAAPFGPWKELSTYSSARAGTSALANALAKELGEYNIPVFAIGPNYLHSEDSPFYYPTEPWKINPEYVAHVKKVTALQRLGTQKELGELVAFLASGSCDYLTGQVFWLAGGFPAIERWPGMPE

SEQ ID NO: 345 - DNA, 768 bp, Artificial Sequence
  HHDH variant
  CDS (1)..(768)
atgagcaccgctattgtcaccaacgtcaaacattttggaggtatgggtagcgctctgaggctgagcgaagctggtcataccgtcgcttgccatgatgaaagctttaagcataaagatgaactggaagcttttgctgaaacctacccacagctgaaaccaatgagcgaacaggaaccagctgaactgattgaagctgtcaccagcgcttttggtcaggtcgatgtcctggtcagcaacgatatctttgctctagaatttcggccaatcgataaatacgctgtcgaggattacaggggtgctgtcgaagctctgcagatcaagccatttgctctagtgaatgctgtggcttcgcaaatgaagaagcgaaagtcggggcacatcatcttcatcacttcggctgccccgttcgggccatggaaggagctatcgacttactcttcggctcgagctgggactagtgcactagctaatgctctatcgaaggagctaggagagtacaatatcccggtgttcgctatcgggccgaattacctacactcggaggattcgccgtactattaccccactgagccgtggaagattaatccggagcacgtggctcacgtgaagaaggtgactgctctacgtcgactagggactcaaaaagagttgggggaattggtggcatttttggcatctggctcttgtgattatttgactggccaggtgttttggttggcgggcggctttcccgctatagaacgttggcccggcatgcccgaataatga

SEQ ID NO: 346 - protein, 254 aa, Artificial Sequence
  HHDH variant
MSTAIVTNVKHFGGMGSALRLSEAGHTVACHDESFKHKDELEAFAETYPQLKPMSEQEPAELIEAVTSAFGQVDVLVSNDIFALEFRPIDKYAVEDYRGAVEALQIKPFALVNAVASQMKKRKSGHIIFITSAAPFGPWKELSTYSSARAGTSALANALSKELGEYNIPVFAIGPNYLHSEDSPYYYPTEPWKINPEHVAHVKKVTALRRLGTQKELGELVAFLASGSCDYLTGQVFWLAGGFPAIERWPGMPE

SEQ ID NO: 347 - DNA, 768 bp, Artificial Sequence; identical to SEQ ID NO: 179
  HHDH variant
  CDS (1)..(768)

SEQ ID NO: 348 - protein, 254 aa, Artificial Sequence; identical to SEQ ID NO: 180
  HHDH variant

SEQ ID NO: 349 - DNA, 768 bp, Artificial Sequence; identical to SEQ ID NO: 197
  HHDH variant
  CDS (1)..(768)

SEQ ID NO: 350 - protein, 254 aa, Artificial Sequence; identical to SEQ ID NO: 198
  HHDH variant

SEQ ID NO: 351 - DNA, 768 bp, Artificial Sequence
  HHDH variant
  CDS (1)..(768)
atgagcaccgctattgtcaccaacgtcaaacattttggaggtatgggtagcgctctgaggctgagcgaagctggtcataccgtcgcttgccatgatgaaagctttaagcataaagatgaactggaagcttttgctgaagcctacccacagctgaaaccaatgagcgaacaggaaccagctgaactgattgaagctgtcaccagcgcttttggtcaggtcgatgtcctggtcagcaacgatatctttgctctagaatttcggccaatcgataaatacgctgtcgaggattacaggggtgctgtcgaagctctgcagatccgcccatttgctctagtgaatgccgtggcttcgcaaatgaagaagcgaaagtcggggcacatcatcttcatcacttcggctgccccgttcgggccatggaaggagctatcgacttactcttcggctcgagctggggctagtgcactagctaatgctctagctaaggagctaggagagtacaatatcccggtgttcgctatcgggccgaattacctacactcggaggattcgccgttctattaccccactgagccgtggaagattaatccggagcacgtggctcacgtgaagaaggtgactgctctacaacgactagggactcaaaaagagttgggggaattggtggcatttttggcatctggctcttgtgattatttgactggccaggtgttttggttggcaggcggctttcccgctatagaacgttggcccggcatgcccgaataatga

SEQ ID NO: 352 - protein, 254 aa, Artificial Sequence
  HHDH variant
MSTAIVTNVKHFGGMGSALRLSEAGHTVACHDESFKHKDELEAFAEAYPQLKPMSEQEPAELIEAVTSAFGQVDVLVSNDIFALEFRPIDKYAVEDYRGAVEALQIRPFALVNAVASQMKKRKSGHIIFITSAAPFGPWKELSTYSSARAGASALANALAKELGEYNIPVFAIGPNYLHSEDSPFYYPTEPWKINPEHVAHVKKVTALQRLGTQKELGELVAFLASGSCDYLTGQVFWLAGGFPAIERWPGMPE

SEQ ID NO: 353 - DNA, 768 bp, Artificial Sequence
  HHDH variant
  CDS (1)..(768)
atgagcaccgctattgtcaccaacgtcaaacattttggaggtatgggtagcgctctgaaactgagcgaagctggtcataccgtcgcttgccatgatgaaagctttaagcataaagatgaactggaagcttttgctgaagcctacccacagctgaaaccactgagcgaacaggaaccagctgaactgattgaagctgtcaccagcgcttttggtcaggtcgatgtcctggtcagcaacgatatctttgctctacaatttcggccaatcgataaatacgctgtcgaggattacaggggtgctgtcgaagctctgcagatcaggccatttgctctagtgaatgctgtggcttcgcaaatgaagaagcgaaagtcggggcacatcatcttcatcacttcggctgccccgttcgggccatggaaggagctatcgacttactcttcggctcgagctgggactagtgcactagctaatgctctatcgaaggagctaggagagtacaatatcccggtgttcgctatcgggccgaattacctacactcggaggattcgccgttctattaccccactgagccgtggaagattaatccggagtatgtggctcacgtgaagaaggtgactgctctacaacgactagggactcaaaaagagttgggggaattggtggcatttttggcatctggctcttgtgattatttgactggccaggtgttttggttggcaggcggctttcccgtcatagaacgttggcccggcatgcccgaataatga

SEQ ID NO: 354 - protein, 254 aa, Artificial Sequence
  HHDH variant
MSTAIVTNVKHFGGMGSALKLSEAGHTVACHDESFKHKDELEAFAEAYPQLKPLSEQEPAELIEAVTSAFGQVDVLVSNDIFALQFRPIDKYAVEDYRGAVEALQIRPFALVNAVASQMKKRKSGHIIFITSAAPFGPWKELSTYSSARAGTSALANALSKELGEYNIPVFAIGPNYLHSEDSPFYYPTEPWKINPEYVAHVKKVTALQRLGTQKELGELVAFLASGSCDYLTGQVFWLAGGFPVIERWPGMPE

SEQ ID NO: 355 - DNA, 768 bp, Artificial Sequence
  HHDH variant
  CDS (1)..(768)
atgagcaccgctattgtcaccaacgtcaaacattttgaaggtatgggtagcgctctgaggctgagcgaagctggtcataccgtcgcttgccatgatgaaagctttaagcataaagatgaactggaagcttttgctgaaacctacccacagctgaaaccaatgagcgaacaggaaccagctgaactgattgaagctgtcaccagcgcttttggtcaggtcgatgtcctggtcagcaacgatatctttgctctagaatttcggccaatcgataaatacgctgtcgaggattacaggggtgctgtcgaagctctgcagatcaggccatttgctctagtgaatgctgtggcttcgcaaatgaagaagcgaaagtcggggcacatcatcttcatcacttcggctgccccgttcgggccatggaaggagctatcgacttactcttcggctcgagctggggctagtgcactagctaatgctctatcgaaggagctaggagagtacaatatcccggtgttcgctatcgggccgaattacctacactcggaggattcgccgtactattaccccactgagccgtggaagattaatccggagcacgtggctcacgtgaagaaggtgactgctctacaacgactagggactcaaaaagagttgggggaattggtggcatttttggcatctggctcttgtgattatttgactggccaggtgttttggttggcaggcggctttcccgtcatagaacgttggcccggcatgcccgaataatga

SEQ ID NO: 356 - protein, 254 aa, Artificial Sequence
  HHDH variant
MSTAIVTNVKHFEGMGSALRLSEAGHTVACHDESFKHKDELEAFAETYPQLKPMSEQEPAELIEAVTSAFGQVDVLVSNDIFALEFRPIDKYAVEDYRGAVEALQIRPFALVNAVASQMKKRKSGHIIFITSAAPFGPWKELSTYSSARAGASALANALSKELGEYNIPVFAIGPNYLHSEDSPYYYPTEPWKINPEHVAHVKKVTALQRLGTQKELGELVAFLASGSCDYLTGQVFWLAGGFPVIERWPGMPE

SEQ ID NO: 357 - DNA, 768 bp, Artificial Sequence
  HHDH variant
  CDS (1)..(768)
atgagcaccgctattgtcaccaacgtcaaacattttggaggtatgggtagcgctctgaggctgagcgaagctggtcataccgtcgcttgccatgatgaaagctttaagcataaagatgaactggaagcttttgctgaagcctacccacagctgaaaccaatgagcgaacaggaaccagctgaactgattgaagctgtcaccagcgcttttggtcaggtcgatgtcctggtcagcaacgatatctttgctctagaatttcggccaatcgataaatactcagtcgagaactacaggggtgctgtcgaagctctgcagatcaggccatttgctctagtgaatgctgtggcttcgcaaatgaagaagcgaaagtcggggcacatcatcttcatcacttcggctgccccgttcgggccatggaaggagctatcgacttactcttcggctcgagctggggctagtgcactagctaatgctctatcgaaggagctaggagagtacaatatcccggtgttcgctatcgggccgaattacctacactcggaggattcgccgttctattaccccactgagccgtggaagattaatccggagtatgtggctcacgtgaagaaggtgactgctctacaacgactagggactcaaaaagagttgggggaattggtggcatttttggcatctggctcttgtgattatttgactggccaggtgttttggttggcaggcggctttcccgtcatagaacgttggcccggcatgctggaataatga

SEQ ID NO: 358 - protein, 254 aa, Artificial Sequence
  HHDH variant
MSTAIVTNVKHFGGMGSALRLSEAGHTVACHDESFKHKDELEAFAEAYPQLKPMSEQEPAELIEAVTSAFGQVDVLVSNDIFALEFRPIDKYSVENYRGAVEALQIRPFALVNAVASQMKKRKSGHIIFITSAAPFGPWKELSTYSSARAGASALANALSKELGEYNIPVFAIGPNYLHSEDSPFYYPTEPWKINPEYVAHVKKVTALQRLGTQKELGELVAFLASGSCDYLTGQVFWLAGGFPVIERWPGMLE

SEQ ID NO: 359 - DNA, 768 bp, Artificial Sequence
  HHDH variant
  CDS (1)..(768)
atgagcaccgctattgtcaccaacgtcaaacattttggaggtatgggtagcgctctgaggctgagcgaagctggtcataccgtcgcttgccatgatgaaagctttaagcataaagatgaactggaagcttttgctgaaacctacccacagctgaaaccaatgagcgaacaggaaccagctgaactgattgaagctgtcaccagcgcttttggtcaggtcgatgtcctggtcagcaacgatatctttgctctagaatttcggccaatcgataaatactcagtcgagaactacaggggtgctgtcgaagctctgcagatcaggccatttgctctagtgcatgctgtggcttcgcaaatgaagaagcgaaagtcggggcacatcatcttcatcacttcggctgccccgttcgggccatggaaggagctatcgacttactcttcggctcgagctggggctagtgcactagctaatgctctatcgaaggagctaggagagtacaatatcccggtgttcgctatcgggccgaattacctacactcggaggattcgccgtactattaccccactgagccgtggaagattaatccggagcacgtggctcacgtgaagaaggtgactgctctacaacgactagggactcaaaaagagttgggggaattggtggcatttttggcatctggctcttgtgattatttgactggccaggtgttttggttggcaggcggctttcccgtcatagaacgttggcccggcatgcccgaataatga

SEQ ID NO: 360 - protein, 254 aa, Artificial Sequence
  HHDH variant
MSTAIVTNVKHFGGMGSALRLSEAGHTVACHDESFKHKDELEAFAETYPQLKPMSEQEPAELIEAVTSAFGQVDVLVSNDIFALEFRPIDKYSVENYRGAVEALQIRPFALVHAVASQMKKRKSGHIIFITSAAPFGPWKELSTYSSARAGASALANALSKELGEYNIPVFAIGPNYLHSEDSPYYYPTEPWKINPEHVAHVKKVTALQRLGTQKELGELVAFLASGSCDYLTGQVFWLAGGFPVIERWPGMPE

SEQ ID NO: 361 - DNA, 768 bp, Artificial Sequence
  HHDH variant
  CDS (1)..(768)
atgagcaccgctattgtcaccaacgtcaaacattttggaggtatgggtagcgctctgaggctgagcgaagctggtcataccgtcgcttgccatgatgaaagctttaagcataaagatgaactggaagcttttgctgacgcctacccacagctgaaaccaatgagcgaacaggaaccagctgaactgattgaagctgtcaccagcgcttttggtcaggtcgatgtcctggtcagcaacgatatctttgctctagaatttcggccaatcgataaatacgctgtcgaggattacaggggtgctgtcgaagctctgcagatccgcccatttgctctagtgaatgctgtggcttcgcaaatgaagaagcgaaagtcggggcacatcatcttcatcacttcggctgccccgttcgggccatggaaggagctatcgacttactcttcggctcgagctgggactagtgcactagctaatgctctatcgaaggagctaggagagtacaatatcccggtgttcgctatcgggccgaattacctacactcggaggattcgccgttctattaccccactgagccgtggaagattaatccggagcacgtggctcacgtgaagaaggtgactgctctacgtcgactagggactcagaaagagttgggggaattggtggcatttttggcatctggctcttgtgattatttgactggccaggtgttttggttggcaggcggctttcccgtcatagaacgttggcccggcatgcccgaataatga

SEQ ID NO: 362 - protein, 254 aa, Artificial Sequence
  HHDH variant
MSTAIVTNVKHFGGMGSALRLSEAGHTVACHDESFKHKDELEAFADAYPQLKPMSEQEPAELIEAVTSAFGQVDVLVSNDIFALEFRPIDKYAVEDYRGAVEALQIRPFALVNAVASQMKKRKSGHIIFITSAAPFGPWKELSTYSSARAGTSALANALSKELGEYNIPVFAIGPNYLHSEDSPFYYPTEPWKINPEHVAHVKKVTALRRLGTQKELGELVAFLASGSCDYLTGQVFWLAGGFPVIERWPGMPE

SEQ ID NO: 363 - DNA, 768 bp, Artificial Sequence
  HHDH variant
  CDS (1)..(768)
atgagcaccgctattgtcaccaacgtcaaacattttggaggtatgggtagcgctctgaaactgagcgaagctggtcataccgtcgcttgccatgatgaaagctttaagcataaagatgaactggaagcttttgctgaagcctacccacagctgaaaccaatggccgaacaggaaccagctgaactgattgaagctgtcaccagcgcttttggtcaggtcgatgtcctggtcagcaacgatatctttgctctagaatttcggccaatcgataaatacgctgtcgaggattacaggggtgctgtcgaagctctgcagatccgcccatttgctctagtgaattcggtggctccacaaatgaagaagcgaaagtcggggcacatcatcttcatcacttcggctgccccgttcgggccatggaaggagctatcgacttactcttcggctcgagctggggctagtgcactagctaatgctctatcgaaggagctaggagagtacaatatcccggtgttcgctatcgggccgaattacctacactcggaggattcgccgttctattaccccactgagccgtggaagattaatccggagcacgtggctcacgtgaagaaggtgactgctctacaacgactagggactcaaaaagagttgggggaattggtggcatttttggcatctggctcttgtgattatttgactggccaggtgttttggttggcaggcggctttcccgtcatagaacgttggcccggcatgctggaataatga

SEQ ID NO: 364 - protein, 254 aa, Artificial Sequence
  HHDH variant
MSTAIVTNVKHFGGMGSALKLSEAGHTVACHDESFKHKDELEAFAEAYPQLKPMAEQEPAELIEAVTSAFGQVDVLVSNDIFALEFRPIDKYAVEDYRGAVEALQIRPFALVNSVAPQMKKRKSGHIIFITSAAPFGPWKELSTYSSARAGASALANALSKELGEYNIPVFAIGPNYLHSEDSPFYYPTEPWKINPEHVAHVKKVTALQRLGTQKELGELVAFLASGSCDYLTGQVFWLAGGFPVIERWPGMLE

SEQ ID NO: 365 - DNA, 768 bp, Artificial Sequence
  HHDH variant
  CDS (1)..(768)
atgagcaccgctattgtcaccaacgtcaaacattttggaggtatgggtagcgctctgaggctgagcgaagctggtcataccgtcgcttgccatgatgaaagctttaagcataaagatgaactggaagcttttgctgaaacctacccacagctgaaaccaatgagcgaacaggaaccagctgaactgattgaagctgtcaccagcgcttttggtcaggtcgatgtcctggtcagcaacgatatctttgctctagaatttcggccaatcgataaatacgctgtcgaggattacaggggtgctgtcgaagctctgcagatcaggccatttgctctagtgaattcggtggctccacaaatgaagaagcgaaagtcggggcacatcatcttcatcacttcggctgccccgttcgggccatggaaggagctatcgacttactcttcggctcgagctggggctagtgcactagctaatgctctatcgaaggagctaggagagtacaatatcccggtgttcgctatcgggccgaattacctacactcggaggattcgccgtactattaccccactgagccgtggaagattaatccggagcacgtggctcacgtgaagaaggtgactgctctacaacgactagggactcaaaaagagttgggggaattggtggcatttttggcatctggctcttgtgattatttgactggccaggtgttttggttggcaggcggctttcccgtcatagaacgttggcccggcatgctggaataatga

SEQ ID NO: 366 - protein, 254 aa, Artificial Sequence
  HHDH variant
MSTAIVTNVKHFGGMGSALRLSEAGHTVACHDESFKHKDELEAFAETYPQLKPMSEQEPAELIEAVTSAFGQVDVLVSNDIFALEFRPIDKYAVEDYRGAVEALQIRPFALVNSVAPQMKKRKSGHIIFITSAAPFGPWKELSTYSSARAGASALANALSKELGEYNIPVFAIGPNYLHSEDSPYYYPTEPWKINPEHVAHVKKVTALQRLGTQKELGELVAFLASGSCDYLTGQVFWLAGGFPVIERWPGMLE

SEQ ID NO: 367 - DNA, 768 bp, Artificial Sequence
  HHDH variant
  CDS (1)..(768)
atgagcaccgctattgtcaccaacgtcaaacattttggaggtatgggtagcgctctgaggctgagcgaagctggtcataccgtcgcttgccatgatgaaagctttaagcataaagatgaactggaagcttttgctgaaacctacccacagctgaaaccaatgagcgaacaggaaccagctgaactgattgaagctgtcaccagcgcttttggtcaggtcgatgtcctggtcagcaacgatatctttgctctagaatttcggccaatcgataaatacgctatcgaggattacaggggtgctgtcgaagctctgcagatcaggccatttgctctagtgcatgctgtggcttcgcaaatgaagaagcgaaagtcggggcacatcatcttcatcacttcggctgccccgttcgggccatggaaggagctatcgacttactcttcggctcgagctggggctagtgcactagctaatgctctatcgaaggagctaggagagtacaatatcccggtgttcgctatcgggccgaattacctacactcggaggattcgccgtactattaccccactgagccgtggaagattaatccggagcacgtggctcacgtgaagaaggtgactgctctacaacgactagggactcaaaaagagttgggggaattggtggcatttttggcatctggctcttgtgattatttgactggccaggtgttttggttggcaggcggctttcccgtcatagaacgttggcccggcatgctggaataatga

SEQ ID NO: 368 - protein, 254 aa, Artificial Sequence
  HHDH variant
MSTAIVTNVKHFGGMGSALRLSEAGHTVACHDESFKHKDELEAFAETYPQLKPMSEQEPAELIEAVTSAFGQVDVLVSNDIFALEFRPIDKYAIEDYRGAVEALQIRPFALVHAVASQMKKRKSGHIIFITSAAPFGPWKELSTYSSARAGASALANALSKELGEYNIPVFAIGPNYLHSEDSPYYYPTEPWKINPEHVAHVKKVTALQRLGTQKELGELVAFLASGSCDYLTGQVFWLAGGFPVIERWPGMLE

SEQ ID NO: 369 - DNA, 768 bp, Artificial Sequence
  HHDH variant
  CDS (1)..(768)
atgagcaccgctattgtcaccaacgtcaaacattttggaggtatgggtagcgctctgaggctgagcgaagctggtcataccgtcgcttgccatgatggtagctttaagcataaagatgaactggaagcttttgctgaagcctacccacagctgaaaccaatgagcgaacaggaaccagctgaactgattgaagctgtcaccagcgcttttggtcatgtcgatgtcctggtcagcaacgatatctttgctctagaatttcggccaatcgataaatactcagtcgaggattacaggggtgctgtcgaagctctgcagatcaggccatttgctctagtgaatgctgtggctccacaaatgaagaagcgaaagtcggggcacatcatcttcatcacttcggctgccccgttcgggccatggaaggagctatcgacttactcttcggctcgagctgggactagtgcactagctaatgctctatcgaaggagctaggagagtacaatatcccggtgttcgctatcgggccgaattacctacactcggaggattcgccgttctattaccccactgagccgtggaagattaatccggagcacgtggctcacgtgaagaaggtgactgctctacaacgactagggactcaaaaagagttgggggaattggtggcatttttggcatctggctcttgtgattatttgactggccaggtgttttggttggcaggcggctttcccgtcatagaacgttggcccggcatgcccgagtaatga

SEQ ID NO: 370 - protein, 254 aa, Artificial Sequence
  HHDH variant
MSTAIVTNVKHFGGMGSALRLSEAGHTVACHDGSFKHKDELEAFAEAYPQLKPMSEQEPAELIEAVTSAFGHVDVLVSNDIFALEFRPIDKYSVEDYRGAVEALQIRPFALVNAVAPQMKKRKSGHIIFITSAAPFGPWKELSTYSSARAGTSALANALSKELGEYNIPVFAIGPNYLHSEDSPFYYPTEPWKINPEHVAHVKKVTALQRLGTQKELGELVAFLASGSCDYLTGQVFWLAGGFPVIERWPGMPE

SEQ ID NO: 371 - DNA, 768 bp, Artificial Sequence
  HHDH variant
  CDS (1)..(768)
atgagcaccgctattgtcaccaacgtcaaacattttggaggtatgggtagcgctctgaggctgagcgaagctggtcataccgtcgcttgtcatgatggtagctttaagcataaagatgaactggaagcttttgctgaagcctacccacagctgaaaccaatgagcgaacaggaaccagctgaactgattgaagctgtcaccagcgcttttggtcaggtcgatgtcctggtcagcaacgatatctttgctctagaatttcggccaatcgataaatactcagtcgaggattacaggggtgctgtcgaagctctgcagatcaggccatttgctctagtgaatgctgtggcttcgcaaatgaagaagcgaaagtcggggcacatcatcttcatcacttcggctgccccgttcgggccatggaaggagctatcgacttactcttcggctcgagctgggactagtgcactagctaatgctctatcgaaggagctaggagagtacaatatcccggtgttcgctatcgggccgaattacctacactcggaggattcgccgtactattaccccactgagccgtggaagattaatccggagtatgtggctcacgtgaagaaggtgactgctctacgtcgactagggactcaaaaagagttgggggaattggtggcatttttggcatctggctcttgtgattatttgactggccaggtgttttggttggcaggcggctttcccgctatagaacgttggcccggcatgcccgaataatga

SEQ ID NO: 372 - protein, 254 aa, Artificial Sequence
  HHDH variant
MSTAIVTNVKHFGGMGSALRLSEAGHTVACHDGSFKHKDELEAFAEAYPQLKPMSEQEPAELIEAVTSAFGQVDVLVSNDIFALEFRPIDKYSVEDYRGAVEALQIRPFALVNAVASQMKKRKSGHIIFITSAAPFGPWKELSTYSSARAGTSALANALSKELGEYNIPVFAIGPNYLHSEDSPYYYPTEPWKINPEYVAHVKKVTALRRLGTQKELGELVAFLASGSCDYLTGQVFWLAGGFPAIERWPGMPE

SEQ ID NO: 373 - DNA, 768 bp, Artificial Sequence
  HHDH variant
  CDS (1)..(768)
atgagcaccgctattgtcaccaacgtcaaacattttgggggtatgggtagcgctctgaggctgagcgaagctggtcataccgtcgcttgccatgatgaaagctttaagcataaagatgaactggaagcttttgctgaaacctacccacagctgaaaccaatgagcgaacaggaaccagctgaactgattgaagctgtcaccagcgcttttggtcatgtcgatgtcctggtcagcaacgatatctttgctctagaatttcggccaatcgataaatacgctgtcgaggattacaggggtgctgtcgaagctctgcagatccgcccatttgctctagtgaatgctgtggcttcgcaaatgaagaagcgaaagtcggggcacatcatcttcatcacttcggctgccccgttcgggccatggaaggagctatcgacttactcttcggctcgagctgggactagtgcactagctaatgctctatcgaaggagctaggagagtacaatatcccggtgttcgctatcgggccgaattacctacactcggaggattcgccgttctattaccccactgagccgtggaagattaatccggagcacgtggctcacgtgaagaaggtgactgctctacaacgactagggactcaaaaagagttgggggaattggtggcatttttggcatctggctcttgtgattatttgactggccaggtgttttggttggcaggcggctttcccgtcatagaacgttggcccggcatgctggaataatga

SEQ ID NO: 374 - protein, 254 aa, Artificial Sequence
  HHDH variant
MSTAIVTNVKHFGGMGSALRLSEAGHTVACHDESFKHKDELEAFAETYPQLKPMSEQEPAELIEAVTSAFGHVDVLVSNDIFALEFRPIDKYAVEDYRGAVEALQIRPFALVNAVASQMKKRKSGHIIFITSAAPFGPWKELSTYSSARAGTSALANALSKELGEYNIPVFAIGPNYLHSEDSPFYYPTEPWKINPEHVAHVKKVTALQRLGTQKELGELVAFLASGSCDYLTGQVFWLAGGFPVIERWPGMLE

SEQ ID NO: 375 - DNA, 768 bp, Artificial Sequence
  HHDH variant
  CDS (1)..(768)
atgagcaccgctattgtcaccaacgtcaaacattttggaggtatgggtagcgctctgaggctgagcgaagctggtcataccgtcgcttgccatgatgaaagctttaagcataaagatgaactggaagcttttgctgaaacctacccacagctgaaaccaatgagcgaacaggaaccagctgaactgattgaagctgtcaccagcgcttttggtcatgtcgatgtcctggtcagcaacgatatctttgctctagaatttcggccaatcgataaatactcagtcgaggattacaggggtgctgtcgaagctctgcagatccgcccatttgctctagtgcatgcggtggctccacaaatgaagaagcgaaagtcggggcacatcatcttcatcacttcggctgccccgttcgggccatggaaggagctatcgacttactcttcggctcgagctgggactagtgcactagctaatgctctatcgaaggagctaggagagtacaatatcccggtgttcgctatcgggccgaattacctacactcggaggattcgccgttctattaccccactgagccgtggaagattaatccggagcacgtggctcacgtgaagaaggtgactgctctacaacgactagggactcagaaagagttgggggaattggtggcatttttggcatctggctcttgtgattatttgactggccaggtgttttggttggcaggcggctttcccgctatagaacgttggcccggcatgcccgaataatga

SEQ ID NO: 376 - protein, 254 aa, Artificial Sequence
  HHDH variant
MSTAIVTNVKHFGGMGSALRLSEAGHTVACHDESFKHKDELEAFAETYPQLKPMSEQEPAELIEAVTSAFGHVDVLVSNDIFALEFRPIDKYSVEDYRGAVEALQIRPFALVHAVAPQMKKRKSGHIIFITSAAPFGPWKELSTYSSARAGTSALANALSKELGEYNIPVFAIGPNYLHSEDSPFYYPTEPWKINPEHVAHVKKVTALQRLGTQKELGELVAFLASGSCDYLTGQVFWLAGGFPAIERWPGMPE

SEQ ID NO: 377 - DNA, 768 bp, Artificial Sequence
  HHDH variant
  CDS (1)..(768)
atgagcaccgctattgtcaccaacgtcaaacattttggaggtatgggtagcgctctgaggctgagcgaagctggtcataccgtcgcttgccatgatgaaagctttaagcataaagatgaactggaagcttttgctgaagcctacccacagctgaaaccaatgagcgaacaggaaccagctgaactgattgaagctgtcaccagcgcttttggtcaggtcgatgtcctggtcagcaacgatatctttgctctagaatttcggccaatcgataaatacgctgtcgaggattacaggggtgctgtcgaagctctgcagatccgcccatttgctctagtgaatgctgtggcttcgcaaatgaagaagcgaaagtcggggcacatcatcttcatcacttcggctgccccgttcgggccatggaaggagctatcgacttactcttcggctcgagctgggactagtgcactagctaatgctctagctaaggagctaggagagtacaatatcccggtgttcgctatcgggccgaattacctacactcggaggattcgccgttctattaccccactgagccgtggaagattaatccggagcacgtggctcacgtgaagaaggtgactgctctacaacgactagggactcaaaaagagttgggggaattggtggcatttttggcatctggctcttgtgattatttgactggccaggtgttttggttggcaggcggctttcccgctatagaacgttggcccggcatgcccgaataatga

SEQ ID NO: 378 - protein, 254 aa, Artificial Sequence; identical to SEQ ID NO: 182
  HHDH variant

SEQ ID NO: 379 - DNA, 768 bp, Artificial
  HHDH variant
  CDS (1)..(768)
atgagcaccgctattgtcaccaacgtcaaacattttggaggtatgggtagcgctctgaggctgagcgaagctggtcataccgtcgcttgccatgatgaaagctttaagcataaagatgaactggaagcttttgctgaaacctacccacagctgaaaccaatgagcgaacaggaaccagctgaactgattgaagctgtcaccagcgcttttggtcaggtcgatgtcctggtcagcaacgatatctttgctctagaatttcggccaatcgataaatacgctgtcgaggattacaggggtgctgtcgaagctctgcagatccgcccatttgctctagtgaatgctgtggcttcgcaaatgaagaagcgaaagtcggggcacatcatcttcatcacttcggctgccccgttcgggccatggaaggagctatcgacttactcttcggctcgagctggggctagtgcactagctaatgctctatcgaaggagctaggagagtacaatatcccggtgttcgctatcgggccgaattacctacactcggaggattcgccgttctattaccccactgagccgtggaggattaatccggagcacgtggctcacgtgaagaaggtgactgctctacaacgactagggactcaaaaagagttgggggaattggtggcatttttggcatctggctcttgtgattatttgactggccaggtgttttggttggcaggcggctttcccgctatagaacgttggcccggcatgcccgaataatga

SEQ ID NO: 380 - protein, 254 aa, Artificial
  HHDH variant
MSTAIVTNVKHFGGMGSALRLSEAGHTVACHDESFKHKDELEAFAETYPQLKPMSEQEPAELIEAVTSAFGQVDVLVSNDIFALEFRPIDKYAVEDYRGAVEALQIRPFALVNAVASQMKKRKSGHIIFITSAAPFGPWKELSTYSSARAGASALANALSKELGEYNIPVFAIGPNYLHSEDSPFYYPTEPWRINPEHVAHVKKVTALQRLGTQKELGELVAFLASGSCDYLTGQVFWLAGGFPAIERWPGMPE

SEQ ID NO: 381 - DNA, 768 bp, Artificial Sequence
  HHDH variant
  CDS (1)..(768)
atgagcaccgctattgtcaccaacgtcaaacattttggaggtatgggtagcgctctgaaactgagcgaagctggtcataccgtcgcttgccatgatgaaagctttaagcataaagatgaactggaagcttttgctgaagcctacccacagctgaaaccaatgagcgaacaggaaccagctgaactgattgaagctgtcaccagcgcttttggtcatgtcgatgtcctggtcagcaacgatatctttgctctacaatttcggccaatcgataaatacgctgtcgaggattacaggggtgctgtcgaagctctgcagatcaggccatttgctctagtgaatgctgtggcttcgcaaatgaagaagcgaaagtcggggcacatcatcttcatcacttcggctgccccgttcgggccatggaaggagctatcgacttactcttcggctcgagctgggactagtgcactagctaatgctctatcgaaggagctaggagagtacaatatcccggtgttcgctatcgggccgaattacctacactcggaggattcgccgtactattaccccactgagccgtggaagattaatccggagcacgtggctcacgtgaagaaggtgactgctctacgtcgactagggactcaaaaagagttgggggaattggtggcatttttggcatctggctcttgtgattatttgactggccaggtgttttggttggcaggcggctttcccgctatagaacgttggcccggcatgcccgaataatga

SEQ ID NO: 382 - protein, 254 aa, Artificial Sequence
  HHDH variant
MSTAIVTNVKHFGGMGSALKLSEAGHTVACHDESFKHKDELEAFAEAYPQLKPMSEQEPAELIEAVTSAFGHVDVLVSNDIFALQFRPIDKYAVEDYRGAVEALQIRPFALVNAVASQMKKRKSGHIIFITSAAPFGPWKELSTYSSARAGTSALANALSKELGEYNIPVFAIGPNYLHSEDSPYYYPTEPWKINPEHVAHVKKVTALRRLGTQKELGELVAFLASGSCDYLTGQVFWLAGGFPAIERWPGMPE

SEQ ID NO: 383 - DNA, 768 bp, Artificial Sequence; identical to SEQ ID NO: 241
  HHDH variant
  CDS (1)..(768)

SEQ ID NO: 384 - protein, 254 aa, Artificial Sequence; identical to SEQ ID NO: 240
  HHDH variant

SEQ ID NO: 385 - DNA, 768 bp, Artificial Sequence; identical to SEQ ID NO: 289
  HHDH variant
  CDS (1)..(768)

SEQ ID NO: 386 - protein, 254 aa, Artificial Sequence; identical to SEQ ID NO: 290
  HHDH variant

SEQ ID NO: 387 - DNA, 768 bp, Artificial Sequence
  HHDH variant
  CDS (1)..(768)
atgagcaccgctattgtcaccaacgtcaaacattttggaggtatgggtagcgctctgaggctgagcgaagctggtcataccgtcgcttgccatgatgaaagctttaagcataaagatgaactggaagcttttgctgaaacctacccacagctgaaaccaatgagcgaacaggaaccagctgaactgattgaagctgtcaccagcgcttttggtcaggtcgatgtcctggtcagcaacgatatctttgctctagaatttcgaccaatcgataaatacgctgtcgagaattacaggggtgctgtcgaagctctgcagatcaggccatttgctctagtgaatgctgtggcttcgcaaatgaagaagcgaaagtcggggcacatcatcttcatcacttcggctgccccgttcgggccatggaaggagctatcgacttactcttcggctcgagctggggctagtgcactagctaatgctctatcgaaggagctaggagagtacaatatcccggtgttcgctatcgggccgaattacctacactcggaggattcgccgtactattaccccactgagccgtggaagattaatccggagcacgtggctcacgtgaagaaggtgactgctctacaacgactagggactcaaaaagagttgggggaattggtggcatttttggcatctggctcttgtgattatctgactggccaggtgttttggttggcaggcggctttcccgtcatagaacgttggcccggcatgcccgaataatga

SEQ ID NO: 388 - protein, 254 aa, Artificial Sequence
  HHDH variant
MSTAIVTNVKHFGGMGSALRLSEAGHTVACHDESFKHKDELEAFAETYPQLKPMSEQEPAELIEAVTSAFGQVDVLVSNDIFALEFRPIDKYAVENYRGAVEALQIRPFALVNAVASQMKKRKSGHIIFITSAAPFGPWKELSTYSSARAGASALANALSKELGEYNIPVFAIGPNYLHSEDSPYYYPTEPWKINPEHVAHVKKVTALQRLGTQKELGELVAFLASGSCDYLTGQVFWLAGGFPVIERWPGMPE

SEQ ID NO: 389 - DNA, 768 bp, Artificial Sequence
  HHDH variant
  CDS (1)..(768)
atgagcaccgctattgtcaccaacgtcaaacattttggaggtatgggtagcgctctgaaactgagcgaagctggtcataccgtcgcttgccatgatgaaagctttaagcataaagatgaactggaagcttttgctgaagcctacccacagctgaaaccaatgaccgaacaggaaccagctgaactgattgaagctgtcaccagcgcttttggtcaggtcgatgtcctggtcagcaacgatatctttgctctagaatttcggccaatcgataaatacgctgtcgaggattacaggggtgctgtcgaagctctgcagatcaagccatttgctctagtgaatgctgtggcttcgcaaatgaagaagcgaaagtcggggcacatcatcttcatcacttcggctgccccgttcgggccatggaaggagctatcgacttactcttcggctcgagctggggctagtgcactagctaatgctctatcgaaggagctaggagagtacaatatcccggtgttcgctatcgggccgaattacctacactcggaggattcgccgtactattaccccactgagccgtggaagattaatccggagcacgtggctcacgtgaagaaggtgactgctctacgtcgactagggactcaaaaagagttgggggaattggtggcatttttggcatctggctcttgtgattatttgactggccaggtgttttggttggcaggcggctttcccgctatagaacgttggcccggcatgctggaataatga

SEQ ID NO: 390 - protein, 254 aa, Artificial Sequence
  HHDH variant
MSTAIVTNVKHFGGMGSALKLSEAGHTVACHDESFKHKDELEAFAEAYPQLKPMTEQEPAELIEAVTSAFGQVDVLVSNDIFALEFRPIDKYAVEDYRGAVEALQIKPFALVNAVASQMKKRKSGHIIFITSAAPFGPWKELSTYSSARAGASALANALSKELGEYNIPVFAIGPNYLHSEDSPYYYPTEPWKINPEHVAHVKKVTALRRLGTQKELGELVAFLASGSCDYLTGQVFWLAGGFPAIERWPGMLE

SEQ ID NO: 391 - DNA, 768 bp, Artificial Sequence
  HHDH variant
  CDS (1)..(768)
atgagcaccgctattgtcaccaacgtcaaacattttggaggtatgggtagcgctctgaggctgagcgaagctggtcataccgtcgcttgccatgatgaaagctttaagcataaagatgaactggaagcttttgctgaaacctacccacagctgaaaccaatgagcgaacaggaaccagctgaactgattgaagctgtcaccagcgcttttggtcaggtcgatgtcctggtcagcaacgatatctttgctctagaatttcggccaatcgataaatacgctgtcgaggattacaggggtgctgtcgaagctctgcagatcaagccatttgctctagtgaatgctgtggcttcgcaaatgaagaagcgaaagtcggggcacatcatcttcatcacttcggctgccccgttcgggccatggaaggagctatcgacttactcttcggctcgagctggggctagtgcactagctaatgctctatcgaaggagctaggagagtacaatatcccggtgttcgctatcgggccgaattacctacactcggaggattcgccgtactattaccccactgagccgtggaagattaatccggagcacgtggctcacgtgaagaaggtgactgctctacaacgactagggactcaaaaagagttgggggaattggtggcatttttggcatctggctcttgtgattatttgactggccaggtgttttggttggcaggcggctttcccgctatagaacgttggcccggcatgcccgaataatga

SEQ ID NO: 392 - protein, 254 aa, Artificial Sequence
  HHDH variant
MSTAIVTNVKHFGGMGSALRLSEAGHTVACHDESFKHKDELEAFAETYPQLKPMSEQEPAELIEAVTSAFGQVDVLVSNDIFALEFRPIDKYAVEDYRGAVEALQIKPFALVNAVASQMKKRKSGHIIFITSAAPFGPWKELSTYSSARAGASALANALSKELGEYNIPVFAIGPNYLHSEDSPYYYPTEPWKINPEHVAHVKKVTALQRLGTQKELGELVAFLASGSCDYLTGQVFWLAGGFPAIERWPGMPE

SEQ ID NO: 393 - DNA, 768 bp, Artificial Sequence; identical to SEQ ID NO: 245
  HHDH variant
  CDS (1)..(768)

SEQ ID NO: 394 - protein, 254 aa, Artificial Sequence; identical to SEQ ID NO: 246
  HHDH variant

SEQ ID NO: 395 - DNA, 768 bp, Artificial
  HHDH variant
  CDS (1)..(768)
atgagcaccgctattgtcaccaacgtcaaacattttggaggtatgggtagcgctctgaaactgagcgaagctggtcataccgtcgcttgccatgatgaaagctttaagcataaagatgaactggaagcttttgctgaaacctacccacagctgaaaccaatgagcgaacaggaaccagctgaactgattgaagctgtcaccagcgcttttggtcaggtcgatgtcctggtcagcaacgatatctttgctctagaatttcgaccaatcgataaatacgctgtcgaggattacaggggtgctgtcgaagctctgcagatcaagccatttgctctagtgaattcggtggcttcgcaaatgaagaagcgaaagtcggggcacatcatcttcatcacttcggctgccccgttcgggccatggaaggagctatcgacttactcttcggctcgagctggggctagtgcactagctaatgctctagctaaggagctaggagagtacaatatcccggtgttcgctatcgggccgaattacctacactcggaggattcgccgtactattaccccactgagccgtggaagattaatccggagcacgtggctcacgtgaagaaggtgactgctctacaacgactagggactcaaaaagagttgggggaattggtggcatttttggcatctggctcttgtgattatttgactggccaggtgttttggttggcaggcggctttcccgctatagaacgttggcccggcatgctggaataatga

SEQ ID NO: 396 - protein, 254 aa, Artificial
  HHDH variant
MSTAIVTNVKHFGGMGSALKLSEAGHTVACHDESFKHKDELEAFAETYPQLKPMSEQEPAELIEAVTSAFGQVDVLVSNDIFALEFRPIDKYAVEDYRGAVEALQIKPFALVNSVASQMKKRKSGHIIFITSAAPFGPWKELSTYSSARAGASALANALAKELGEYNIPVFAIGPNYLHSEDSPYYYPTEPWKINPEHVAHVKKVTALQRLGTQKELGELVAFLASGSCDYLTGQVFWLAGGFPAIERWPGMLE

SEQ ID NO: 397 - DNA, 768 bp, Artificial
  HHDH variant
  CDS (1)..(768)
atgagcaccgctattgtcaccaacgtcaaacattttggaggtatgggtagcgctctgaggctgagcgaagctggtcataccgtcgcttgccatgatgaaagctttaagcataaagatgaactggaagcttttgctgaaacctacccacagctgaaaccaatgagcgaacaggaaccagctgaactgattgaagctgtcaccagcgcttttggtcaggtcgatgtcctggtcagcaacgatatctttgctctagaatttcggccaatcgataaatacgctgtcgaggattacaggggtgctgtcgaagctctgcagatcaggccatttgctctagtgcattcggtggctccacaaatgaagaagcgaaagtcggggcacatcatcttcatcacttcggctgccccgttcgggccatggaaggagctatcgacttactcttcggctcgagctggggctagtgcactagctaatgctctatcgaaggagctaggagagtacaatatcccggtgttcgctatcgggccgaattacctacactcggaggattcgccgtactattaccccactgagccgtggaagattaatccggagcacgtggctcacgtgaagaaggtgactgctctacaacgactagggactcaaaaagagttgggggaattggtggcatttttggcatctggctcttgtgattatttgactggccaggtgttttggttggcaggcggctttcccgtcatagaacgttggcccggcatgctggaataatga

SEQ ID NO: 398 - protein, 254 aa, Artificial
  HHDH variant
MSTAIVTNVKHFGGMGSALRLSEAGHTVACHDESFKHKDELEAFAETYPQLKPMSEQEPAELIEAVTSAFGQVDVLVSNDIFALEFRPIDKYAVEDYRGAVEALQIRPFALVHSVAPQMKKRKSGHIIFITSAAPFGPWKELSTYSSARAGASALANALSKELGEYNIPVFAIGPNYLHSEDSPYYYPTEPWKINPEHVAHVKKVTALQRLGTQKELGELVAFLASGSCDYLTGQVFWLAGGFPVIERWPGMLE

SEQ ID NO: 399 - DNA, 768 bp, Artificial Sequence
  HHDH variant
  CDS (1)..(768)
atgagcaccgctattgtcaccaacgtcaaacattttggaggtatgggtagcgctctgaaactgagcgaagctggtcataccgtcgcttgccatgatgaaagctttaagcataaagatgaactggaagcttttgctgaagcctacccacagctgaaaccaatgagcgaacaggaaccagctgaactgattgaagctgtcaccagcgcttttggtcatgtcgatgtcctggtcagcaacgatatctttgctctagaatttcggccaatcgataaatactcagtcgaggattacaggggtgctgtcgaagctctgcagatcaggccatttgctctagtgaatgctgtggctccacaaatgaagaagcgaaagtcggggcacatcatcttcatcacttcggctgccccgttcgggccatggaaggagctatcgacttactcttcggctcgagctgggactagtgcactagctaatgctctatcgaaggagctaggagagtacaatatcccggtgttcgctatcgggccgaattacctacactcggaggattcgccgttctattaccccactgagccgtggaagattaatccggagtatgtggctcacgtgaagaaggtgactgctctacaacgactagggactcaaaaagagttgggggaattggtggcatttttggcatctggctcttgtgattatttgactggccaggtgttttggttggcaggcggctttcccgtcatagaacgttggcccggcatgcccgaataatga

SEQ ID NO: 400 - protein, 254 aa, Artificial Sequence
  HHDH variant
MSTAIVTNVKHFGGMGSALKLSEAGHTVACHDESFKHKDELEAFAEAYPQLKPMSEQEPAELIEAVTSAFGHVDVLVSNDIFALEFRPIDKYSVEDYRGAVEALQIRPFALVNAVAPQMKKRKSGHIIFITSAAPFGPWKELSTYSSARAGTSALANALSKELGEYNIPVFAIGPNYLHSEDSPFYYPTEPWKINPEYVAHVKKVTALQRLGTQKELGELVAFLASGSCDYLTGQVFWLAGGFPVIERWPGMPE

SEQ ID NO: 401 - DNA, 768 bp, Artificial Sequence
  HHDH variant
  CDS (1)..(768)
atgagcaccgctattgtcaccaacgtcaaacattttggaggtatgggtagcgctctgaaactgagcgaagctggtcataccgtcgcttgccatgatggtagctttaagcataaagatgaactggaagcttttgctgaaacctacccacagctgaaaccaatgagcgaacaggaaccagctgaactgattgaagctgtcaccagcgcttttggtcatgtcgatgtcctggtcagcaacgatatctttgctctagaatttcggccaatcgataaatactcagtcgaggattacaggggtgctgtcgaagctctgcagatccgcccatttgctctagtgaatgctgtggcttcgcaaatgaagaagcgaaagtcggggcacatcatcttcatcacttcggctgccccgttcgggccatggaaggagctatcgacttactcttcggctcgagctggggctagtgcactagctaatgctctatcgaaggagctaggagagtacaatatcccggtgttcgctatcgggccgaattacctacactcggaggattcgccgtactattaccccactgagccgtggaagattaatccggagcacgtggctcacgtgaagaaggtgactgctctacaacgactagggactcaaaaagagttgggggaattggtggcatttttggcatctggctcttgtgattatttgactggccaggtgttttggttggcaggcggctttcccgctatagaacgttggcccggcatgctggaataatga

SEQ ID NO: 402 - protein, 254 aa, Artificial Sequence
  HHDH variant
MSTAIVTNVKHFGGMGSALKLSEAGHTVACHDGSFKHKDELEAFAETYPQLKPMSEQEPAELIEAVTSAFGHVDVLVSNDIFALEFRPIDKYSVEDYRGAVEALQIRPFALVNAVASQMKKRKSGHIIFITSAAPFGPWKELSTYSSARAGASALANALSKELGEYNIPVFAIGPNYLHSEDSPYYYPTEPWKINPEHVAHVKKVTALQRLGTQKELGELVAFLASGSCDYLTGQVFWLAGGFPAIERWPGMLE

SEQ ID NO: 403 - DNA, 768 bp, Artificial Sequence
  HHDH variant
  CDS (1)..(768)
atgagcaccgctattgtcaccaacgtcaaacattttggaggtatgggtagcgctctgaggctgagcgaagctggtcataccgtcgcttgccatgatgaaagctttaagcataaagatgaactggaagcttttgctgaaacctacccacagctgaaaccaatgagcgaacaggaaccagctgaactgattgaagctgtcaccagcgcttttggtcaggtcgatgtcctggtcagcaacgatatctttgctctagaatttcggccaatcgataaatactcagtcgagaactacaggggtgctgtcgaagctctgcagatcaggccatttgctctagtgcattcggtggcttcgcaaatgaagaagcgaaagtcggggcacatcatcttcatcacttcggctgccccgttcgggccatggaaggagctatcgacttactcttcggctcgagctggggctagtgcactagctaatgctctatcgaaggagctaggagagtacaatatcccggtgttcgctatcgggccgaattacctacactcggaggattcgccgtactattaccccactgagccgtggaagattaatccggagcacgtggctcacgtgaagaaggtgactgctctacaacgactagggactcaaaaagagttgggggaattggtggcatttttggcatctggctcttgtgattatttgactggccaggtgttttggttggcaggcggctttcccgccatagaacgttggcccggcatgctggaataatga

SEQ ID NO: 404 - protein, 254 aa, Artificial Sequence
  HHDH variant
MSTAIVTNVKHFGGMGSALRLSEAGHTVACHDESFKHKDELEAFAETYPQLKPMSEQEPAELIEAVTSAFGQVDVLVSNDIFALEFRPIDKYSVENYRGAVEALQIRPFALVHSVASQMKKRKSGHIIFITSAAPFGPWKELSTYSSARAGASALANALSKELGEYNIPVFAIGPNYLHSEDSPYYYPTEPWKINPEHVAHVKKVTALQRLGTQKELGELVAFLASGSCDYLTGQVFWLAGGFPAIERWPGMLE

SEQ ID NO: 405 - DNA, 768 bp, Artificial Sequence
  HHDH variant
  CDS (1)..(768)
atgagcaccgctattgtcaccaacgtcaaacattttggaggtatgggtagcgctctgaggctgagcgaagctggtcataccgtcgcttgccatgatgaaagctttaagcataaagatgaactggaagcttttgctgaagcctacccacagctgaaaccaatgagcgaacaggaaccagctgaactgattgaagctgtcaccagcgcttttggtcaggtcgatgtcctggtcagcaacgatatctttgctctagaatttcggccaatcgataaatacgctgtcgaggattacaggggtgctgtcgaagctctgcagatcaagccatttgctctagtgaatgctgtggcttcgcaaatgaagaagcgaaagtcggggcacatcatcttcatcacttcggctgccccgttcgggccatggaaggagctatcgacttactcttcggctcgagctgggactagtgcactagctaatgctctatcgaaggagctaggagagtacaatatcccggtgttcgctatcgggccgaattacctacactcggaggattcgccgttctattaccccactgagccgtggaagattaatccggagcacgtggctcacgtgaagaaggtgactgctctacaacgactagggactcaaaaagagttgggggaattggtggcatttttggcatctggctcttgtgattatttgactggccaggtgttttggttggcaggcggctttcccgtcatagaacgttggcccggcatgcccgaataatga

SEQ ID NO: 406 - protein, 254 aa, Artificial Sequence
  HHDH variant
MSTAIVTNVKHFGGMGSALRLSEAGHTVACHDESFKHKDELEAFAEAYPQLKPMSEQEPAELIEAVTSAFGQVDVLVSNDIFALEFRPIDKYAVEDYRGAVEALQIKPFALVNAVASQMKKRKSGHIIFITSAAPFGPWKELSTYSSARAGTSALANALSKELGEYNIPVFAIGPNYLHSEDSPFYYPTEPWKINPEHVAHVKKVTALQRLGTQKELGELVAFLASGSCDYLTGQVFWLAGGFPVIERWPGMPE

SEQ ID NO: 407 - DNA, 768 bp, Artificial Sequence
  HHDH variant
  CDS (1)..(768)
atgagcaccgctattgtcaccaacgtcaaacattttggaggtatgggtagcgctctgaggctgagcgaagctggtcataccgtcgcttgccatgatgaaagctttaagcataaagatgaactggaagcttttgctgaaacctacccacagctgaaaccaatgagcgaacaggaaccagctgaactgattgaagctgtcaccagcgcttttggtcaggtcgatgtcctggtcagcaacgatatctttgctctagaatttcggccaatcgataaatacgctgtcgaggattacaggggtgctgtcgaagctctgcagatcaggccatttgctctagtgaatgctgtggcttcgcaaatgaagaagcgaaagtcggggcacatcatcttcatcacttcggctgccccgttcgggccatggaaggagctatcgacttactcttcggctcgagctggggctagtgcactagctaatgctctatcgaaggagctaggagagtacaatatcccggtgttcgctatcgggccgaattacctacactcggaggattcgccgtactattaccccactgagccgtggaagattagtccggagcacgtggctcacgtgaagaaggtgactgctctacaacgactagggactcaaaaagagttgggggaattggtggcatttttggcatctggctcttgtgattatttgactggccaggtgttttggttggcaggcggctttcccgtcatagaacgttggcccggcatgctggaataatga

SEQ ID NO: 408 - protein, 254 aa, Artificial Sequence
  HHDH variant
MSTAIVTNVKHFGGMGSALRLSEAGHTVACHDESFKHKDELEAFAETYPQLKPMSEQEPAELIEAVTSAFGQVDVLVSNDIFALEFRPIDKYAVEDYRGAVEALQIRPFALVNAVASQMKKRKSGHIIFITSAAPFGPWKELSTYSSARAGASALANALSKELGEYNIPVFAIGPNYLHSEDSPYYYPTEPWKISPEHVAHVKKVTALQRLGTQKELGELVAFLASGSCDYLTGQVFWLAGGFPVIERWPGMLE

SEQ ID NO: 409 - DNA, 768 bp, Artificial Sequence
  HHDH variant
  CDS (1)..(768)
atgagcaccgctattgtcaccaacgtcaaacattttggaggtatgggtagcgctctgaaactgagcgaagctggtcataccgtcgcttgccatgatgaaagctttaagcataaagatgaactggaagcttttgctgaagcctacccacagctgaaaccaatggccgaacaggaaccagctgaactgattgaagctgtcaccagcgcttttggtcatgtcgatgtcctggtcagcaacgatatctttgctctagaatttcggccaatcgataaatactcagtcgagaactacaggggtgctgtcgaagctctgcagatcaggccatttgctctagtgaatgctgtggcttcgcaaatgaagaagcgaaagtcggggcacatcatcttcatcacttcggctgccccgttcgggccatggaaggagctatcgacttactcttcggctcgagctgggactagtgcactagctaatgctctatcgaaggagctaggagagtacaatatcccggtgttcgctatcgggccgaattacctacactcggaggattcgccgtactattaccccactgagccgtggaagattaatccggagcacgtggctcacgtgaagaaggtgactgctctacaacgactagggactcaaaaagagttgggggaattggtggcatttttggcatctggctcttgtgattatttgactggccaggtgttttggttggcaggcggctttcccgctatagaacgttggcccggcatgctggaataatga

SEQ ID NO: 410 - protein, 254 aa, Artificial Sequence
  HHDH variant
MSTAIVTNVKHFGGMGSALKLSEAGHTVACHDESFKHKDELEAFAEAYPQLKPMAEQEPAELIEAVTSAFGHVDVLVSNDIFALEFRPIDKYSVENYRGAVEALQIRPFALVNAVASQMKKRKSGHIIFITSAAPFGPWKELSTYSSARAGTSALANALSKELGEYNIPVFAIGPNYLHSEDSPYYYPTEPWKINPEHVAHVKKVTALQRLGTQKELGELVAFLASGSCDYLTGQVFWLAGGFPAIERWPGMLE

SEQ ID NO: 411 - DNA, 768 bp, Artificial Sequence
  HHDH variant
  CDS (1)..(768)
atgagcaccgctattgtcaccaacgtcaaacattttggaggtatgggtagcgctctgaggctgagcgaagctggtcataccgtcgcttgccatgatggtagctttaagcataaagatgaactggaagcttttgctgaagcctacccacagctgaaaccactgagcgaacaggaaccagctgaactgattgaagctgtcaccagcgcttttggtcaggtcgatgtcctggtcagcaacgatatctttgctctagaatttcggccaatcgataaatactcagtcgagaactacaggggtgctgtcgaagctctgcagatcaggccatttgctctagtgaatgctgtggcttcgcaaatgaagaagcgaaagtcggggcacatcatcttcatcacttcggctgccccgttcgggccatggaaggagctatcgacttactcttcggctcgagctgggactagtgcactagctaatgctctagctaaggagctaggagagtacaatatcccggtgttcgctatcgggccgaattacctacactcggaggattcgccgtactattaccccactgagccgtggaagattaatccggagtatgtggctcacgtgaagaaggtgactgctctacaacgactagggactcaaaaagagttgggggaattggtggcatttttggcatctggctcttgtgattatttgactggccaggtgttttggttggcaggcggctttcccgtcatagaacgttggcccggcatgcccgaataatga

SEQ ID NO: 412 - protein, 254 aa, Artificial Sequence
  HHDH variant
MSTAIVTNVKHFGGMGSALRLSEAGHTVACHDGSFKHKDELEAFAEAYPQLKPLSEQEPAELIEAVTSAFGQVDVLVSNDIFALEFRPIDKYSVENYRGAVEALQIRPFALVNAVASQMKKRKSGHIIFITSAAPFGPWKELSTYSSARAGTSALANALAKELGEYNIPVFAIGPNYLHSEDSPYYYPTEPWKINPEYVAHVKKVTALQRLGTQKELGELVAFLASGSCDYLTGQVFWLAGGFPVIERWPGMPE

SEQ ID NO: 413 - DNA, 768 bp, Artificial Sequence
  HHDH variant
  CDS (1)..(768)
atgagcaccgctattgtcaccaacgtcaaacattttggaggtatgggtagcgctctgaggctgagcgaagctggtcataccgtcgcttgtcatgacgaaagctttaagcataaagatgaactggaagcttttgctgaaacctacccacagctgaaaccaatgagcgaacaggaaccagctgaactgattgaagctgtcaccagcgcttttggtcaggtcgatgtcctggtcagcaacgatatctttgctctagaatttcggccaatcgataaatactcagtcgagaactacaggggtgctgtcgaagctctgcagatcaggccatttgctctagtgaatgctgtggctccacaaatgaagaagcgaaagtcggggcacatcatcttcatcacttcggctgccccgttcgggccatggaaggagctatcgacttactcttcggctcgagctggggctagtgcactagctaatgctctatcgaaggagctaggagagtacaatatcccggtgttcgctatcgggccgaattacctacactcggaggattcgccgtactattaccccactgagccgtggaagattaatccggagcacgtggctcacgtgaagaaggtgactgctctacaacgactagggactcaaaaagagttgggggaattggtggcatttttggcatctggctcttgtgattatttgactggccaggtgttttggttggcaggcggctttcccgtcatagaacgttggcccggcatgcccgaataatga

SEQ ID NO: 414 - protein, 254 aa, Artificial Sequence
  HHDH variant
MSTAIVTNVKHFGGMGSALRLSEAGHTVACHDESFKHKDELEAFAETYPQLKPMSEQEPAELIEAVTSAFGQVDVLVSNDIFALEFRPIDKYSVENYRGAVEALQIRPFALVNAVAPQMKKRKSGHIIFITSAAPFGPWKELSTYSSARAGASALANALSKELGEYNIPVFAIGPNYLHSEDSPYYYPTEPWKINPEHVAHVKKVTALQRLGTQKELGELVAFLASGSCDYLTGQVFWLAGGFPVIERWPGMPE

SEQ ID NO: 415 - DNA, 768 bp, Artificial Sequence
  HHDH variant
  CDS (1)..(768)
atgagcaccgctattgtcaccaacgtcaaacattttggaggtatgggtagcgctctgaaactgagcgaagctggtcataccgtcgcttgccatgatgaaagctttaagcataaagatgaactggaagcttttgctgaagcctacccacagctgaaaccaatgagcgaacaggaaccagctgaactgattgaagctgtcaccagcgcttttggtcatgtcgatgtcctggtcagcaacgatatctttgctctagaatttcggccaatcgataaatacgctgtcgaggattacaggggtgctgtcgaagctctgcagatcaggccatttgctctagtgaatgctgtggcttcgcaaatgaagaagcgaaagtcggggcacatcatcttcatcacttcggctgccccgttcgggccatggaaggagctatcgacttactcttcggctcgagctgggactagtgcactagctaatgctctatcgaaggagctaggagagtacaatatcccggtgttcgctatcgggccgaattacctacactcggaggattcgccgttctattaccccactgagccgtggaagattaatccggagcacgtggctcacgtgaagaaggtgactgctctacgtcgactagggactcaaaaagagttgggggaattggtggcatttttggcatctggctcttgtgattatttgactggccaggtgttttggttggcaggcggctttcccgctatagaacgttggcccggcatgcccgaataatga

SEQ ID NO: 416 - protein, 254 aa, Artificial Sequence
  HHDH variant
MSTAIVTNVKHFGGMGSALKLSEAGHTVACHDESFKHKDELEAFAEAYPQLKPMSEQEPAELIEAVTSAFGHVDVLVSNDIFALEFRPIDKYAVEDYRGAVEALQIRPFALVNAVASQMKKRKSGHIIFITSAAPFGPWKELSTYSSARAGTSALANALSKELGEYNIPVFAIGPNYLHSEDSPFYYPTEPWKINPEHVAHVKKVTALRRLGTQKELGELVAFLASGSCDYLTGQVFWLAGGFPAIERWPGMPE

SEQ ID NO: 417 - DNA, 768 bp, Artificial Sequence
  HHDH variant
  CDS (1)..(768)
atgagcaccgctattgtcaccaacgtcaaacattttggaggtatgggtagcgctctgaggctgagcgaagctggtcataccgtcgcttgccatgatgaaagctttaagcataaagatgaactggaagcttttgctgaaacctacccacagctgaaaccaatgagcgaacaggaaccagctgaactgattgaagctgtcaccagcgcttttggtcaggtcgatgtcctggtcagcaacgatatctttgctctagaatttcggccaatcgataaatacgctgtcgaggattacaggggtgctgtcgaagctctgcagatcaggccatttgctctagtgaattcggtggcttcgcaaatgaagaagcgaaagtcggggcacatcatcttcatcacttcggctgccccgttcgggccatggaaggagctatcgacttactcttcggctcgagctggggctagtgcactagctaatgctctatcgaaggagctaggagagtacaatatcccggtgttcgctatcgggccgaattacctacactcggaggattcgccgtactattaccccactgagccgtggaagattaatccggagcacgtggctcacgtgaagaaggtgactgctctacaacgactagggactcaaaaagagttgggggaattggtggcatttttggcatctggctcttgtgattatttgactggccaggtgttttggttggcaggcggctttcccgtcatagaacgttggcccggcatgctggaataatga

SEQ ID NO: 418 - protein, 254 aa, Artificial Sequence
  HHDH variant
MSTAIVTNVKHFGGMGSALRLSEAGHTVACHDESFKHKDELEAFAETYPQLKPMSEQEPAELIEAVTSAFGQVDVLVSNDIFALEFRPIDKYAVEDYRGAVEALQIRPFALVNSVASQMKKRKSGHIIFITSAAPFGPWKELSTYSSARAGASALANALSKELGEYNIPVFAIGPNYLHSEDSPYYYPTEPWKINPEHVAHVKKVTALQRLGTQKELGELVAFLASGSCDYLTGQVFWLAGGFPVIERWPGMLE

SEQ ID NO: 419 - DNA, 768 bp, Artificial Sequence
  HHDH variant
  CDS (1)..(768)
atgagcaccgctattgtcaccaacgtcaaacattttggaggtatgggtagcgctctgaggctgagcgaagctggtcataccgtcgcttgccatgatggtagctttaagcataaagatgaactggaagcttttgctgaaacctacccacagctgaaaccaatgagcgaacaggaaccagctgaactgattgaagctgtcaccagcgcttttggtcaggtcgatgtcctggtcagcaacgatatctttgctctagaatttcggccaatcgataaatacgctgtcgaggattacaggggtgctgtcgaagctctgcagatcaggccatttgctctagtgaatgctgtggcttcgcaaatgaagaagcgaaagtcggggcacatcatcttcatcacttcggctgccccgttcgggccatggaaggagctatcgacttactcttcggctcgagctggggctagtgcactagctaatgctctatcgaaggagctaggagagtacaatatcccggtgttcgctatcgggccgaattacctacactcggaggattcgccgtactattaccccactgagccgtggaagattaatccggagcacgtggctcacgtgaagaaggtgactgctctacaacgactagggactcaaaaagagttgggggaattggtggcatttttggcatctggctcttgtgattatttgactggccaggtgttttggttggcaggcggctttcccgtcatagaacgttggcccggcatgcccgaataatga

SEQ ID NO: 420 - protein, 254 aa, Artificial Sequence
  HHDH variant
MSTAIVTNVKHFGGMGSALRLSEAGHTVACHDGSFKHKDELEAFAETYPQLKPMSEQEPAELIEAVTSAFGQVDVLVSNDIFALEFRPIDKYAVEDYRGAVEALQIRPFALVNAVASQMKKRKSGHIIFITSAAPFGPWKELSTYSSARAGASALANALSKELGEYNIPVFAIGPNYLHSEDSPYYYPTEPWKINPEHVAHVKKVTALQRLGTQKELGELVAFLASGSCDYLTGQVFWLAGGFPVIERWPGMPE

SEQ ID NO: 421 - DNA, 774 bp, Artificial Sequence
  HHDH variant
  CDS (1)..(774)
atgagcagcgctatcgtcactaacgtcaaacattttggtggtatgggtagcgctctgaggctgagcgaagctggtcataccgtcgcttgccatgatggaagctttaaacagaaagatgaactggaagattttgcagacacctacccacagatgaaaccaatgagcgaacaggaaccaggtgaactgatcgaagctgtcaccagcgcttacggtcaggtcgatgtcctggtcagcaacgatgtctttgctccagaatttcagccaatggataaatacgctgtcgaagattacaggggtgctgtcgaagctccgcagatcaggccatttgctctagtgaatgctgtggcttcgcaaatgaagaagcgaaagtcggggcacatcatcttcatcacttcggctactccgttcgggccgtggaaggagctatcgacttacacttcggctcgagctggggcttgtactctagctaatgctctatcgaaggagctaggagagtacaatatcccggtgttcgctatcgggccgaattacctacactcggaggattcgccgtacttctacccgactgagccgtggaagactaatccggagcacgtggctcacctgaagaaggtgactgctctacaacgactagggactcaaaaagagttgggggaattggtggcatttttggcatctggctcttgtgattatttgactggccaggtgttttggttggcaggcggctttcccatgatagaacgttggcccggcatgcccgaataatgaggatcc

SEQ ID NO: 422 - protein, 254 aa, Artificial Sequence
  HHDH variant
MSSAIVTNVKHFGGMGSALRLSEAGHTVACHDGSFKQKDELEDFADTYPQMKPMSEQEPGELIEAVTSAYGQVDVLVSNDVFAPEFQPMDKYAVEDYRGAVEAPQIRPFALVNAVASQMKKRKSGHIIFITSATPFGPWKELSTYTSARAGACTLANALSKELGEYNIPVFAIGPNYLHSEDSPYFYPTEPWKTNPEHVAHLKKVTALQRLGTQKELGELVAFLASGSCDYLTGQVFWLAGGFPMIERWPGMPE

SEQ ID NO: 423 - DNA, 774 bp, Artificial Sequence
  HHDH variant
  CDS (1)..(774)
atgagcagcgctattgtcaccaacttcaaacattttggaggtatgggtagcgctctgcgtctgagcgaagctggtcataccgtcgcttgccatgatgaaagctttaagcatcaggatgaactagaagcttttgctgaaacctacccacagctgataccaatgagcgaacaggaaccagctgaactgattgaagctgtcaccagcgctcttggtcatgtcgatgtcctggtcagcaacgatatcgcgcctgtggaatggcggccaatcgataaatacgctgtcgaggattacagggatactgtcgaagctctgcatatcaagccatttgctctagtgaatgctgccgcttcccaaatgaacaagcgaaagtcggggcacatcatcttcatcacttcggctgccccgttcgggccatggaaggagctatcgacttactcttcggctcgagctggggctagtgcactagctaatgctctatcgaaggagctaggagagtacaatatcccggtgttcgctatcgctccgaattacctacactcgggggattcgccgtactattacccctctgagccgtggaagacttctccggagcacgtggctcacgtgcgtaaggtgactgctctacaacgactagggactcaaaaagagttgggggaattggtgacgtttttggcatctggctcttgtgattatttgactggccaggtgttttggttggcaggcggctttcccgtcatcgaacgttggcccggcatgcccgaataatgaggatcc

SEQ ID NO: 424 - protein, 254 aa, Artificial Sequence
  HHDH variant
MSSAIVTNFKHFGGMGSALRLSEAGHTVACHDESFKHQDELEAFAETYPQLIPMSEQEPAELIEAVTSALGHVDVLVSNDIAPVEWRPIDKYAVEDYRDTVEALHIKPFALVNAAASQMNKRKSGHIIFITSAAPFGPWKELSTYSSARAGASALANALSKELGEYNIPVFAIAPNYLHSGDSPYYYPSEPWKTSPEHVAHVRKVTALQRLGTQKELGELVTFLASGSCDYLTGQVFWLAGGFPVIERWPGMPE

SEQ ID NO: 425 - DNA, 774 bp, Artificial Sequence
  HHDH variant
  CDS (1)..(774)
atgagcaccgctatcgtcaccaacttcaaacattttggaggtatgggtagcgctctgaggctgagcgaagctggtcataccgtcgcttgccatgatgaaagctttaaacagaaagatgaactggaagcttttgctgaaacctacccacagctgaaaccaatgagcgaacaggaaccagctgaactgatcgaagctgtcaccagcgcttacggtcaggtcgatgtcctggtcatcaacgatatctttgctccagaatttcagccaatcgataaatacgctgtccaggattacaggggtgctgtcgaagctctgcagatcaggccatttgctctagtgaatgctgtggcttcgcaaatgaagaagcgaaagtcggggcacatcatcttcatcacttcggctaccccgttcgggccatggaaggagctatcgacttacacttcggctcgagctggggcttgtcccctagctaatgctctatcgaaggagctaggagagtacaatatcccggtgttcgctatcgggcctaattacctacactcggaggattcgccgtacttctacccgactgagccgtggaagactaatccggagcacgtggctcacgtgaagaaggtgactgctctacaacgactagggactcaaaaagagttgggggaattggtggcatttttggcatctggctcttgtgattatttgactgaccaggtgttttggttggcaggcggctttcccatgatagaacgttggcccggcatgcccgaataatgaggatcc

SEQ ID NO: 426 - protein, 254 aa, Artificial Sequence; identical to SEQ ID NO: 144
  HHDH variant

SEQ ID NO: 427 - DNA, 768 bp, Artificial Sequence
  HHDH variant
  CDS (1)..(768)
atgagcaccgctattgtcaccaacttcaaacattttggaggtatgggtagcgctctgcgtctgagcgaagctggtcataccgtcgcttgccatgatgaaagctttaagcatcaggatgaactgaaagcttttgctaaaacctacccacagctgataccaatgagcgaacagcaaccagctcaactgattaaagctgtcaccagcgctcttggtcaggtcgatgtcctggtcagcaacgatatcgctgctgtggaatggcggccaatcgataaatacgctgtcgaggattacaggggtactgtcgaagctctgcagatcaagccatttgctctagtgaatgctgtcgcttcgcaaatgaagaggcgaaagtcggggcacatcatcttcatcacttcggctgccccgttcgggccatggaaggagctatcgacttactcttcggctcgagctggggctagtgcactagctaatgctctatcgaaggagctaggagagtacaatatcccggtgttcgctatcgctccgaattacctacactcggaggattcgccgtactattacccctctgagccgtggaagacttctccggagcacgtggctcacgtgcgtaaggtgactgctctacaacgactagggactcaaaaagagttgggggaattggtgacatttttggcatctggctcttgtgattatttgactggccaggtgttttggttggcaggcggctttcccgtcatcgaacgttggcccggcatgcccgaataatga

SEQ ID NO: 428 - protein, 254 aa, Artificial Sequence
  HHDH variant
MSTAIVTNFKHFGGMGSALRLSEAGHTVACHDESFKHQDELKAFAKTYPQLIPMSEQQPAQLIKAVTSALGQVDVLVSNDIAAVEWRPIDKYAVEDYRGTVEALQIKPFALVNAVASQMKRRKSGHIIFITSAAPFGPWKELSTYSSARAGASALANALSKELGEYNIPVFAIAPNYLHSEDSPYYYPSEPWKTSPEHVAHVRKVTALQRLGTQKELGELVTFLASGSCDYLTGQVFWLAGGFPVIERWPGMPE

SEQ ID NO: 429 - DNA, 768 bp, Artificial Sequence
  HHDH variant
  CDS (1)..(768)
atgagcaccgctattgtcacgaacttcacacattttggaggtatgggtagcgctctcaggctgagcgaagctggtcataccgtcgcttgccatgatgaaagctttaagcatcaggatgaactggaagcttttgctgacacctacccacagctgataccaatgagcgaacaggaaccagctgaactgattgaagctgtcaccagcgcttttggtcaggtcgatgtcctggtcagcaacgatatcgctgctgtggaatggcggccaatcgataaatacgctgtcgaggattacaggggtactgtcgaagctctgcagatccgcccatttgctctagtgaatgctgtggcttcgcaaatgaagaagcgacgttcggggcacatcatcttcatcacttcggctgccccgttcgggccatggaaggagctatcgacttactcttcggctcgagctggggctagtgcactagctaatgctctatcgaaggagctaggagagtacaatatcccggtgttcgctatcgctccgaattacctacactcggaggattcgccgtactattacccctctgagccgtggaagatttctccggagcacgtggctcacgtgcgtaaggtgactgctctacgtcgactagggactcaaaaagagttgggggaattggtgacatttttggcatctggctcttgtgattatttgactggccaggtgttttggttggcaggcggctttcccgtcatcgaacgttggcccggcatgcccgaataatga

SEQ ID NO: 430 - protein, 254 aa, Artificial Sequence
  HHDH variant
MSTAIVTNFTHFGGMGSALRLSEAGHTVACHDESFKHQDELEAFADTYPQLIPMSEQEPAELIEAVTSAFGQVDVLVSNDIAAVEWRPIDKYAVEDYRGTVEALQIRPFALVNAVASQMKKRRSGHIIFITSAAPFGPWKELSTYSSARAGASALANALSKELGEYNIPVFAIAPNYLHSEDSPYYYPSEPWKISPEHVAHVRKVTALRRLGTQKELGELVTFLASGSCDYLTGQVFWLAGGFPVIERWPGMPE

SEQ ID NO: 431 - DNA, 768 bp, Artificial Sequence
  HHDH variant
  CDS (1)..(768)
atgagcaccgttattgtcaccaacttcaaacattttggaggtatgggtagcgctctgaggctgagcgaagctggtcataccgtcgcttgccatgatgaaagctttaagcataaagatgaactggaagcttttgctgaaacctacccacagctgaaaccaatgagcgaacaggaaccagctgaactgattgaagctgtcaccagcacttttggtcaggtcgatgtcctggtcagcaacgatatctttgctgtggaatggcggccaatcgataaatacgctgtcgaggattacaggggtgctgtcgaagctctgcagatcaggccatttgctctagtgaatgctgtggcttcgcaaatgaagaagcgaaagtcggggcacatcatcttcatcacttcggctgccccgttcgggccatggaaggagctatcgacttactcttcggctcgagctgggactagtgcactagctaatgctctatcgaaggagctaggagagtacaatatcccggtgttcgctatcgctccgaattacctacactcggaggattcgccgtactattacccctctgagccgtggaagatttctccggagcacgtggctcacgtgcgtaaggtgactgctctacgtcgactagggactcaacgcgagttgggggaattggtgacatttttggcatctggctcttgtgattatttgactggccaggtgttttggttggcaggcggctttcccgtcatcgaacgttggcccggcatgcccgaataatga

SEQ ID NO: 432 - protein, 254 aa, Artificial Sequence
  HHDH variant
MSTVIVTNFKHFGGMGSALRLSEAGHTVACHDESFKHKDELEAFAETYPQLKPMSEQEPAELIEAVTSTFGQVDVLVSNDIFAVEWRPIDKYAVEDYRGAVEALQIRPFALVNAVASQMKKRKSGHIIFITSAAPFGPWKELSTYSSARAGTSALANALSKELGEYNIPVFAIAPNYLHSEDSPYYYPSEPWKISPEHVAHVRKVTALRRLGTQRELGELVTFLASGSCDYLTGQVFWLAGGFPVIERWPGMPE

SEQ ID NO: 433 - DNA, 711 bp, Artificial Sequence
  HHDH variant
  CDS (1)..(711)
atggccaacggtcgcaaacgcgagttcgcgaacggccgcctggcgggcaaactcgtgctgctgaccaacgccgatgcctacatgggtgaagcgaccgtgcaggttttcgaggaagagggcgcggaagtttttgccgaccacaccgacctgaccaaagtgggcgccgccgaagaagtggtggaacgcgcgggccacatcgatgtgctggttgccaactttgcggtggatgcgcactttggtgttaccgtgctggaaaccgatgaagagctgtggcagaccgcctatgagaccatcgttcatccgctgcaccgtatctgtcgcgccgtgctgccgcagttttatgaacgcaacaaaggcaaaatcgtggtgtacggtagcgccgccgccatgcgttatcaagaaggtgcgctggcctacagcaccgcccgcttcgcgcagcgtggttacgtgaccgccctgggccctgaggccgcgcgtcacaacgtgaacgtgaacttcattgcccagcattggacccagaataaagaatacttctggccggaacgcatcgcgaccgacgaattcaaagaagatatggcgcgccgcgttccgctgggtcgcctggccaccgcgcgcgaagacgcgctgctggccctgtttctggcgagcgacgaaagcgattttatcgttggtaaaagcattgagtttgatggcggttgggcgacctaatga

SEQ ID NO: 434 - protein, 235 aa, Artificial Sequence
  HHDH variant
MANGRKREFANGRLAGKLVLLTNADAYMGEATVQVFEEEGAEVFADHTDLTKVGAAEEVVERAGHIDVLVANFAVDAHFGVTVLETDEELWQTAYETIVHPLHRICRAVLPQFYERNKGKIVVYGSAAAMRYQEGALAYSTARFAQRGYVTALGPEAARHNVNVNFIAQHWTQNKEYFWPERIATDEFKEDMARRVPLGRLATAREDALLALFLASDESDFIVGKSIEFDGGWAT

SEQ ID NO: 435 - DNA, 768 bp, Artificial Sequence
  HHDH variant
  CDS (1)..(768)
atgagcaccgctattgtcaccaacgtcctccattttggaggtatgggtagcgctctgaggctgagcgaagctggtcataccgtcgcttgccatgatgaaagctttaagcataaagatgaactggaagcttttgctgaaacctacccacagctgaaaccaatgagcgaacaggaaccagctgaactgattgaagctgtcaccagcgcttttggtcaggtcgatgtcctggtcagcaacgatatctttgctctagaatttcggccaatcgataaatacgctgtcgaggattacaggggtgctgtcgaagctctgcagatcaggccatttgctctagtgaatgctgtggcttcgcaaatgaagaagcgaaagtcggggcacatcatcttcatcacttcggctgccccgttcgggccatggaaggagctatcgacttactcttcgtctcgagctgggactagtgcactagctaatgctctatcgaaggagctaggagagtacaatatcccggtgttcgctatcgggccgaattacctacactcggaggattcgccgtactattaccccactgagccgtggaagattaatccggagcacgtggctcacgtgaagaaggtgactgctctacaacgactagggactcaaaaagagttgggggaattggtggcatttttggcatctggctcttgtgattatttgactggccaggtgttttggttggcaggcggctttcccgtcatagaacgttggcccggcatgcccgaataatga

SEQ ID NO: 436 - protein, 254 aa, Artificial Sequence
  HHDH variant
MSTAIVTNVLHFGGMGSALRLSEAGHTVACHDESFKHKDELEAFAETYPQLKPMSEQEPAELIEAVTSAFGQVDVLVSNDIFALEFRPIDKYAVEDYRGAVEALQIRPFALVNAVASQMKKRKSGHIIFITSAAPFGPWKELSTYSSSRAGTSALANALSKELGEYNIPVFAIGPNYLHSEDSPYYYPTEPWKINPEHVAHVKKVTALQRLGTQKELGELVAFLASGSCDYLTGQVFWLAGGFPVIERWPGMPE

SEQ ID NO: 437 - DNA, 774 bp, Artificial Sequence
  HHDH variant
  CDS (1)..(774)
atgagcaccgctattgtcaccaacgtcaaacattttggaggtatgggtagcgctctgtgtctgagcgaagctggtcataccgtcgcttgccatgatgaaagctttaagcatcaggatgaactagaagcttttgctgaaacctacccacagctgataccaatgagcgaacagaaaccagctgaactgattgaagctgtcaccagcgctcttggtcatgtcgatgtcctggtcagcaacgatatcgcgcctgtggaatggcggccaatcgataaatacgctgtcgaggattacagggatactgtcgaagctctgcagatcaagccatttgctctagtgaatgctgtcgcttcgcaaatgaagaagcgaaagtcggggcacatcatcttcatcacttcggctgccccgttcgggccatggaaggagctatcgacttactcttcggctcgagctggggctagtgcactagctaatgctctatcgaaggagctaggagagtacaatatcccggtgttcgctatcgctccgaattacctacactcgggggattcgccgtactattacccctctgagccgtggaagacttctccggagcacgtggctcacgtgcgtaaggtgactgctctacaacgactagggactcaaaaagagttgggggaattggtgacgtttttggcatctggctcttgtgattatttgactggccaggtgttttggttggcaggcggctttcccgtcatcgaacgttggcccggcatgcccgaataatgaggatcc

SEQ ID NO: 438 - protein, 254 aa, Artificial Sequence
  HHDH variant
MSTAIVTNVKHFGGMGSALCLSEAGHTVACHDESFKHQDELEAFAETYPQLIPMSEQKPAELIEAVTSALGHVDVLVSNDIAPVEWRPIDKYAVEDYRDTVEALQIKPFALVNAVASQMKKRKSGHIIFITSAAPFGPWKELSTYSSARAGASALANALSKELGEYNIPVFAIAPNYLHSGDSPYYYPSEPWKTSPEHVAHVRKVTALQRLGTQKELGELVTFLASGSCDYLTGQVFWLAGGFPVIERWPGMPE

SEQ ID NO: 439 - DNA, 768 bp, Artificial Sequence
  HHDH variant
  CDS (1)..(768)
atgagcaccgctatcgtcaccaacgtcaaacattttggtggtatgggtagcgttctgaggctgagcgaagctggtcataccgtcgcttgccttgttgaaagctttaaacagaaagatgaactggaagcttttgctgaaacctacccacagctgaactcaatgagcgaacaggaaccagctgaactgatcgaagctgtcaccagcgcttacggtcaggtcgatgtcctggtcagcaacgatatctttgctccaggatttcagccaatcgataaatacgctgtcgaagattacaggggtgctgtcgaagctctgcagatcaggccatttgctctagtgaatgctgtggcttcgcaaatgaagaagcgaaagtcggggcacatcatcttcatcacttcggctactccgttcgggccgtggaaggagctatcgacttacacttcggctcgagctggggcttgtactctagataatgctctatcgaaggagctaggagagtacaatatcccggtgttcgctatcgggccgaattacctacactcggaggattcgccgtacttctacccgactgagccgtggaagactaatccggagcacgtggctcacgtgaagaaggtgactgctctacaacgactagggactcaaaaagagttgggggaattggtggcatttttggcatctggctcttgtgattatttgactggccaggtgttttggatggcaggcggctttcccatgatagaacgttggcccggcatgcccgaataatga

SEQ ID NO: 440 - protein, 254 aa, Artificial Sequence
  HHDH variant
MSTAIVTNVKHFGGMGSVLRLSEAGHTVACLVESFKQKDELEAFAETYPQLNSMSEQEPAELIEAVTSAYGQVDVLVSNDIFAPGFQPIDKYAVEDYRGAVEALQIRPFALVNAVASQMKKRKSGHIIFITSATPFGPWKELSTYTSARAGACTLDNALSKELGEYNIPVFAIGPNYLHSEDSPYFYPTEPWKTNPEHVAHVKKVTALQRLGTQKELGELVAFLASGSCDYLTGQVFWMAGGFPMIERWPGMPE

SEQ ID NO: 441 - DNA, 774 bp, Artificial Sequence
  HHDH variant
  CDS (1)..(774)
atgagcaccgctattgtcaccaacgtcaaacattttggaggtatgggtagcgctctgcgtctgagcgaagctggtcataccgtcgcttgccttgatgaaagctttaagcatcaggatgaactagaagcttttgctgaaacctacccacagctgataccaatgagcgaacaggaaccagctgaactgattgaagctgtcaccagcgctcttggtcatgtcgatgtcctggtcagcaacgatatcgcgcctgtggaatggcggccaatcgataaatacgctgtcgaggattacagggatactgtcgaagctctgcagatcaagccatttgctctagtgaatgctgtcgcttcgcaaatgaagaagcgaaagtcggggcacatcatcttcatcacttcggctgccccgttcgggccacgtaaggaggtctcgacttactcttcggctcgagctggggctagtgcactagctaatgctctatcgaaggagctaggagagtacaatatcccggtgttcgctatcgctccgcgttacctacacatcggggattcgccgtacaaatacccctctgagccgtggaagacttctccggagcacgtggctcacgtgcgtaaggtgactgctctacaacgactagggactcaaaaagagttgggggaattggtgacgtttttggcatctggctcttgtgattatttgactggccaggtgttttggttggcaggcggctttcccgtcatcgaacgttggcccggcatgcccgaataatgaggatcc

SEQ ID NO: 442 - protein, 254 aa, Artificial Sequence
  HHDH variant
MSTAIVTNVKHFGGMGSALRLSEAGHTVACLDESFKHQDELEAFAETYPQLIPMSEQEPAELIEAVTSALGHVDVLVSNDIAPVEWRPIDKYAVEDYRDTVEALQIKPFALVNAVASQMKKRKSGHIIFITSAAPFGPRKEVSTYSSARAGASALANALSKELGEYNIPVFAIAPRYLHIGDSPYKYPSEPWKTSPEHVAHVRKVTALQRLGTQKELGELVTFLASGSCDYLTGQVFWLAGGFPVIERWPGMPE

SEQ ID NO: 443 - DNA, 768 bp, Artificial Sequence
  HHDH variant
  CDS (1)..(768)
atgagcaccgctattgtcaccaacgtcaaacattttggaggtatgggtagcgctctgaggctgagcgaagctggtcataccgtcgcttgccatgatggaagctttaagcataaagatgaactggaagcttttgctgaaacctacccacagctgaaaccaatgagcgaacaggaaccagctgaactgattgaagctgtcaccagcgcttttggtcaggtcgatgtcctggtcagcaacgatatctttgctctagaatttcggccaatcgataaatacgctgtcgaggattacaggggtgctgtcgaagctctgcagatcaggccatttgctctagtgaatgctgtggcttcgcaaatgaagaagcgaaagtcggggcacatcatcttcatcacttcggctgccccgttcgggccatggaaggagctatcggcgtactcttcggctcgagctggggctagtgcactagctaatgctctatcgaaggagctaggagagtacaatatcccggtgttcgctatcgggccgaattacctacactcggaggattcgccgtactattaccccactgagccgtggaagattaatccggagcacgtggctcacgtgaagaaggtgactgctctacaacgactagggactcaaaaagagttgggggaattggtggcatttttggcatctggctcttgtgattatttgactggccaggtgttttggttggcaggcggctttcccgtcatagaacgttggcccggcatgcccgaataatga

SEQ ID NO: 444 - protein, 254 aa, Artificial Sequence
  HHDH variant
MSTAIVTNVKHFGGMGSALRLSEAGHTVACHDGSFKHKDELEAFAETYPQLKPMSEQEPAELIEAVTSAFGQVDVLVSNDIFALEFRPIDKYAVEDYRGAVEALQIRPFALVNAVASQMKKRKSGHIIFITSAAPFGPWKELSAYSSARAGASALANALSKELGEYNIPVFAIGPNYLHSEDSPYYYPTEPWKINPEHVAHVKKVTALQRLGTQKELGELVAFLASGSCDYLTGQVFWLAGGFPVIERWPGMPE

SEQ ID NO: 445 - DNA, 774 bp, Artificial Sequence
  HHDH variant
  CDS (1)..(774)
atgagcaccgctattgtcaccaacgtcaaacattttggaggtatgggtagcgctctgaggctgagcgaaggtggtcataccgtcgcttgccatgatggaagctttaaacagaaagatgaactggaagcttttgctgaaacctacccacagctgaaaccaatgagcgaacaggaaccagctgaactgatcgaagctgtcaccagcgcttttggtcaggtcgatgtcctggtcagcaacgatatctttgctctagaatttcagccaatcgataaatacgctgtcgaagattacaggggtgctgtcgaagctctgcagatcaggccacttgctctagtgaatgctgtggctccgcaaatgaagaagcgaaagtcggggcacatcatcttcatcacttcggctgccccgttcgggccatggaaggagctatcgacttacacttcggctcgagctggggctagtactctagttaatgctctatcgaaggagctaggagagtacaatatcccggtgttcgctatcgggccgaattacctacactcggaggattcgccgtactattaccccactgagccgtggaagattaatccggagcacgtggctcacgtgaagaaggtgactgctctacaacgactagggactcaaaaagagttgggggaattggtggcatttttggcatctggctcttgtgattatttgactggccaggtgttttggttggcaggcggctttcccacgatagaacgttggcccggcatgcccgaataatgaggatcc

SEQ ID NO: 446 - protein, 254 aa, Artificial Sequence
  HHDH variant
MSTAIVTNVKHFGGMGSALRLSEGGHTVACHDGSFKQKDELEAFAETYPQLKPMSEQEPAELIEAVTSAFGQVDVLVSNDIFALEFQPIDKYAVEDYRGAVEALQIRPLALVNAVAPQMKKRKSGHIIFITSAAPFGPWKELSTYTSARAGASTLVNALSKELGEYNIPVFAIGPNYLHSEDSPYYYPTEPWKINPEHVAHVKKVTALQRLGTQKELGELVAFLASGSCDYLTGQVFWLAGGFPTIERWPGMPE

SEQ ID NO: 447 - DNA, 768 bp, Artificial Sequence
  HHDH variant
  CDS (1)..(768)
atgagcgccgctatcgtcaccagcgtcaaccattttggtggtatgggtagcgctctgaggctgaacgaagctggtcataccttcgcttgccatgatggaagctttaaccagaaagatgaactggaagcttttactgaagcctacgcacagctgaaaccaatgagcgaacaggaaccagctgaactgatcgaagctgtcaccagcgcttacggtcaggtcgatgtcctggtcagcaacgatatctttgctccagaatttcagccaatcgataaatacgctgtcgaagattacaggggtgctgtcgaagctctgcagatcaggccatttgctctagtgaatgctgtggcttcgcaaatgaagaagcgaaagtcggggcacatcatcttcatcacttcggctactccgttcgggccgtggaaggagctatcgacttacacttcggctcgagctggggcttgtactctagctaatgctctatcgaaggagctaggagagtacaatatcccggtgttcgctatcgggccgaattacctacactcggaggattcgccgtacttctacccgactgagccgtggaagactaatccggagcacgtggctcacgtgaagaaggtgactgctctacaacgactagggactcaaaaagagttgggggaattggtggcatttttggcatctggctcttgtgattatttgactggccaggtgtttaagttggcaggcggctttcccatgatagaacgttggcccggcatgcccgaataatga

SEQ ID NO: 448 - protein, 254 aa, Artificial Sequence
  HHDH variant
MSAAIVTSVNHFGGMGSALRLNEAGHTFACHDGSFNQKDELEAFTEAYAQLKPMSEQEPAELIEAVTSAYGQVDVLVSNDIFAPEFQPIDKYAVEDYRGAVEALQIRPFALVNAVASQMKKRKSGHIIFITSATPFGPWKELSTYTSARAGACTLANALSKELGEYNIPVFAIGPNYLHSEDSPYFYPTEPWKTNPEHVAHVKKVTALQRLGTQKELGELVAFLASGSCDYLTGQVFKLAGGFPMIERWPGMPE

SEQ ID NO: 449 - DNA, 774 bp, Artificial Sequence
  HHDH variant
  CDS (1)..(774)
atgagcaccgctatcgtcaccaacgtcaaacattttggaggtatgggtagcgctctgaggctgagcgaagctggtcataccgtcgcttgccatgatgaaagctttaaacagaaagatgaactggaagcttttgctgaaacctacccacagctgaaaccaatgagcgaacaggaaccagctgaactgatcgaagctgtcaccagcgcttacggtcaggtcgatgtcctggtcagcaacgatatctttgctccagaactgcagccaatcgataaatacgctgtcgaagattacaggggtgctgtcgaagctctgcagatcaggccatttgctctagtgaatgctgtggcttcgcaaatgaagaagcgaaagtcggggcacatcatcttcatcacttcggctactccgttcgggccatggaaggagctatcgacttacacttcggctcgagctggggcttgtactctagctaatgctctatcgaaggagctaggagagtacaatatcccggtgttcgctatcgggccgaattacctacactcggaggattcgccgtacttctacccgactgagccgtggaagactaatccggagcacgtggctcacgtgaagaaggtgactggtctacaacgactagggactcaaaaagagttgggggaattggtggcatttttggcatctggctcttgtgattatttgactggccaggtgttttggttggcaggcggctttcccatgatagaacgttggcccggcatgcccgaataatgaggatcc

SEQ ID NO: 450 - protein, 254 aa, Artificial Sequence
  HHDH variant
MSTAIVTNVKHFGGMGSALRLSEAGHTVACHDESFKQKDELEAFAETYPQLKPMSEQEPAELIEAVTSAYGQVDVLVSNDIFAPELQPIDKYAVEDYRGAVEALQIRPFALVNAVASQMKKRKSGHIIFITSATPFGPWKELSTYTSARAGACTLANALSKELGEYNIPVFAIGPNYLHSEDSPYFYPTEPWKTNPEHVAHVKKVTGLQRLGTQKELGELVAFLASGSCDYLTGQVFWLAGGFPMIERWPGMPE

SEQ ID NO: 451 - DNA, 774 bp, Artificial Sequence
  HHDH variant
  CDS (1)..(774)
atgagcaccgctatcgtcaccaacgtcaaacattttggaggtatgggtagcgctctgaggctgagcgaagctggtcataccgtcgcttgccatgatgaaagctttaaacagaaagatgaactggaagcttttgctgaaacctacccacagctgaaaccaatgagcgaacaggaaccagctgaactgatcgaagctgtcaccagcgcttttggtcaggtcgatgtcctggtcagcaacgatatctttgctccagaatttcagccaatcgataaatacgctgtccaagattacaggggtgctgtcgaagctctgcagatcaggccatttgctctagtgaatgctgtggcttcgcaaatgaagaagcgaaagtcggggcacatcatcttcatcacttcggctgccccgttcgggccatggaaggagctatcgacttacacttcggctcgagctggggctagtactctagctaatgctctatcgaaggagctaggagagtacaatatcccggtgttcgctatcgggccgaattacctacactcggaggattcgccgtacttctacccgactgagccgtggaagactaatccggagcacgtggctcacgtgaagaaggtgactgctctacaacgactagggactcaaaaagagttgggggaattggtggcatttttggcatctggctcttgtgattatttgactggccaggtgttttggttggcaggcggctttcccatgatagaacgttggcccggcatgcccgaataatgaggatcc

SEQ ID NO: 452 - protein, 254 aa, Artificial Sequence; identical to SEQ ID NO: 136
  HHDH variant

SEQ ID NO: 453 - DNA, 774 bp, Artificial Sequence
  HHDH variant
  CDS (1)..(774)
atgagcaccgctatcgtcaccaacgtcaaacattttggaggtatgggtagcgctctgaggctgagcgaagctggtcataccgtcgcttgccatgatgaaagctttaaacagaaagatgaagtcgaagcttttgctgaaacctacccacagctgaaaccaatgagcgaacaggaaccagctgaactgatcgaagctgtcaccagcgcttacggtcaggtcgatgtcctggtcagcaacgatatctttgctccagaactgcatccaatcgataaatacgctgtcgaagattacaggggtgctgtcgaagctctgcagatcaggccatttgctctagtgaatgctgtggcttcgcaaatgaagaagcgaaagtcggggcacatcatcttcatcacttcgtctactccgctggggccatggaaggagctatcgacttacacttcggctcgagctggggcttgtactctagctaatgctctatcgaaggagctaggagagtacaatatcccggtgttcgctatcgggccgaattacctacactcggaggattcgccgtacttctacccgactgagccgtggaagactaatccggagcacgtggctcacgtgaagaaggtgactgctctacaacgactagggactcaaaaagagttgggggaattggtggcatttttggcatctggctcttgtgattatttgactggccagctgttttggttggcaggcggctttcccatgatagaacgttggcccggcatgcccgaataatgaggatcc

SEQ ID NO: 454 - protein, 254 aa, Artificial Sequence
  HHDH variant
MSTAIVTNVKHFGGMGSALRLSEAGHTVACHDESFKQKDEVEAFAETYPQLKPMSEQEPAELIEAVTSAYGQVDVLVSNDIFAPELHPIDKYAVEDYRGAVEALQIRPFALVNAVASQMKKRKSGHIIFITSSTPLGPWKELSTYTSARAGACTLANALSKELGEYNIPVFAIGPNYLHSEDSPYFYPTEPWKTNPEHVAHVKKVTALQRLGTQKELGELVAFLASGSCDYLTGQLFWLAGGFPMIERWPGMPE

SEQ ID NO: 455 - DNA, 774 bp, Artificial Sequence
  HHDH variant
  CDS (1)..(774)
atgagcaccgctatcgtcaccaacgtcaaacattttggaggtatgggtagcgctctgaggctgagcgaagctggtcataccgtcgcttgccatgatgaaagctttaaacagaaagatgatctggaagcttttgctgatacctacccacagctgaaaccaatgagcgaacaggaaccagctgaactgatcgaagctgtcaccagcgcttacggtcaggtcgatgtcctggtcagcaacgatatctttgctccagaatttcagccaatcgataaatacgctgtcgaagattacaggggtgctgtcgaagctctgcagatcaggccatttgctctagtgaatgctgcggcttcgcaaatgaagaagcgaaagtcggggcacatcatcttcatcacttcggctactccgttcgggccatggaaggagctatcgacttacacttcggctcgagccggggcttgtactctagctaatgctctatcgaaggagctaggagagtacaatatcccggtgttcgctatcgggccgaattacctacactcggaggattcgccgtacttctacccgactgagccgtggaagactaatccggagcacgtggctcacgtgaagaaggtgactgctctacaacgactagggactcaaaaagagttgggggaattggtggcatttttggcatctggctcttgtgattatttgactggccaggtgttttggttggcaggcggctttcccatgatagaacgttggcccggcatgcccgaataatgaggatcc

SEQ ID NO: 456 - protein, 254 aa, Artificial Sequence
  HHDH variant
MSTAIVTNVKHFGGMGSALRLSEAGHTVACHDESFKQKDDLEAFADTYPQLKPMSEQEPAELIEAVTSAYGQVDVLVSNDIFAPEFQPIDKYAVEDYRGAVEALQIRPFALVNAAASQMKKRKSGHIIFITSATPFGPWKELSTYTSARAGACTLANALSKELGEYNIPVFAIGPNYLHSEDSPYFYPTEPWKTNPEHVAHVKKVTALQRLGTQKELGELVAFLASGSCDYLTGQVFWLAGGFPMIERWPGMPE

SEQ ID NO: 457 - DNA, 774 bp, Artificial Sequence
  HHDH variant
  CDS (1)..(774)
atgagcaccgctatcgtcactaacgtcaaacattttggtggtatgggtagcgctctgaggctgagcgaagctggtcataccgtcgcttgccatgatgaaagctttaaacagaaagatgaactggaagcttttgctgaaacctacccacagctgaaaccaatgagcgaacaggaaccagctgaactgatcgaagctgtcaccagcgcttacggtcaggtcgatgtcctggtcagcaacgatatctttgctccagaatttcagccaatcgataaatacgctgtcgaagattacaggggtgctgtcgaagctctgcagatcaggccatttgctctagtgaatgctgtggcttcgcaaatgaagaagcgaaagtcggggcacatcatcttcatcacttcggctactccgttcgggccgtggaaggagctatcgacttacacttcggctcgagctggggcttgtactctagctaatgctctatcgaaggagctaggagagtacaatatcccggtgttcgctatcgggccgaattacctacactcggaggattcgccgtacttctacccgactgagccgtggaagactaatccggagcacgtggctcacgtgaagaaggtgactgctctacaacgactggggactcaaaaagagttgggggaattggtggcatttttggcatctggctcttgtgattatttgactggccaggtgttttggatggcaggcggctttcccatgatagaacgttggcccggcatgcccgaataatgaggatcc

SEQ ID NO: 458 - protein, 254 aa, Artificial Sequence
  HHDH variant
MSTAIVTNVKHFGGMGSALRLSEAGHTVACHDESFKQKDELEAFAETYPQLKPMSEQEPAELIEAVTSAYGQVDVLVSNDIFAPEFQPIDKYAVEDYRGAVEALQIRPFALVNAVASQMKKRKSGHIIFITSATPFGPWKELSTYTSARAGACTLANALSKELGEYNIPVFAIGPNYLHSEDSPYFYPTEPWKTNPEHVAHVKKVTALQRLGTQKELGELVAFLASGSCDYLTGQVFWMAGGFPMIERWPGMPE

SEQ ID NO: 459 - DNA, 768 bp, Artificial Sequence
  HHDH variant
  CDS (1)..(768)
atgagcaccgctattgtcaccaacgtcaaacattttggaggtatgggtagcgctctgaggctgagcgaagctggtcataccgtcgcttgccatgatgaaagctttaagcataaagatgaactggaagcttttgctgaaacctacccacagctgaaaccagtgagcgaacaggaaccagctgaactgattgaagctgtcaccagcgcttttggtcaggtcgatgtcctggtcagcaacgatatctttgctctagaatttcggccaatcgataaatacgctgtcgaggattacaggggtgctgtcgaagctctgcagatcaggccatttgctctagtgaatgctgtggcttcgcaaatgaagaagcgaaagtcggggcacatcatcttcatcacttcggctgccccgttcgggccatggaaggagctatcggcgtactcttcggctcgagctggggctagtgcactagctaatgctctatcgaaggagctaggagagtacaatatcccggtgttcgctatcgggccgaattacctacactcgaaggattcgccgtactattaccccactgagccgtggaagattaatccggagcacgtggctcacgtgaagaaggtgactgctctacaacgactagggactcaaaaagagttgggggaattggtggcatttttggcatctggctcttgtgattatttgactggccaggtgttttggttggcaggcggctttcccgtcatagaacgttggcccggcatgcccgaataatga

SEQ ID NO: 460 - protein, 254 aa, Artificial Sequence
  HHDH variant
MSTAIVTNVKHFGGMGSALRLSEAGHTVACHDESFKHKDELEAFAETYPQLKPVSEQEPAELIEAVTSAFGQVDVLVSNDIFALEFRPIDKYAVEDYRGAVEALQIRPFALVNAVASQMKKRKSGHIIFITSAAPFGPWKELSAYSSARAGASALANALSKELGEYNIPVFAIGPNYLHSKDSPYYYPTEPWKINPEHVAHVKKVTALQRLGTQKELGELVAFLASGSCDYLTGQVFWLAGGFPVIERWPGMPE

SEQ ID NO: 461 - DNA, 768 bp, Artificial Sequence
  HHDH variant
  CDS (1)..(768)
atgagcaccgctattgtcaccaacgtcaaacattttggaggtatgggtagcgctctgcgtctgagcgaagctggtcataccgtcgcttgccatgatgaaagctttaagcatcaggatgaactagaagcttttgctgaaacctacccacagctgataccagtgagcgaacaggaaccagctgaactgattgaagcagtcaccagcgctcttggtcatgtcgatgtcctggtcagcaacgatatcgcgcctgtggaatggcggccaatcgataaatacgctgtcgaggattacagggatactgtcgaagctctgcagatcaagccatttgctctagtgaatgctgtcgcttcgcaaatgaagaagcgaaagtcggggcacatcatcttcatcacttcggctgccccgttcgggccatggaaggagctatcgacttactcttcggctcgagctggggctagtgcactagctaatgctctatcgaaggagctaggagagtacaatatcccggtgttcgctatcgctccgaattacctacactcgggggattcgccgtactattacccctctgagccgtggaagacttctccggagcacgtggctcacgtgcgtaaggtgactgctctacaacgactagggactcaaaaagagttgggggaattggtgacgtttttggcatctggctcttgtgattatttgactggccaggtgttttggttggcaggcggctttcccgtcatcgaacgttggcccggcatgcccgaataatga

SEQ ID NO: 462 - protein, 254 aa, Artificial Sequence
  HHDH variant
MSTAIVTNVKHFGGMGSALRLSEAGHTVACHDESFKHQDELEAFAETYPQLIPVSEQEPAELIEAVTSALGHVDVLVSNDIAPVEWRPIDKYAVEDYRDTVEALQIKPFALVNAVASQMKKRKSGHIIFITSAAPFGPWKELSTYSSARAGASALANALSKELGEYNIPVFAIAPNYLHSGDSPYYYPSEPWKTSPEHVAHVRKVTALQRLGTQKELGELVTFLASGSCDYLTGQVFWLAGGFPVIERWPGMPE

SEQ ID NO: 463 - DNA, 774 bp, Artificial Sequence
  HHDH variant
  CDS (1)..(774)
atgagcaccgctattgtcaccaacgtcaaacattttggaggtatgggtagcgctctgcgtctgagcgaagctggtcataccgtcgcttgccatgatgaaagctttaagcatcaggatgaactagaagcttttgctgaaacctacccacagctgataccagtgagcgaacaggaaccagctgaactgattgaagctgtcaccagcgctcttggtcatgtcgatgtcctggtcagcaacgatatcgcgcctgtggaatggcggccaatcgataaatacgctgtcgaggattacagggatactgtcgaagctctgcagatcaagccatttgctctagtgaatgctgtcgcttcgcaaatgaagaagcgaaagtcggggcacatcatcttcatcacttcggctgccccgttcgggccatggaaggagctatcgacttactcttcggctcgagctggggctagtgcactagctaatgctctatcgaaggagctaggagagtacaatatcccggtgttcgctatcgctccgaattacctacactcgggggattcgccgtactattacccctctgagccgtggaagacttctccggagcacgtggctcacgtgcgtaaggtgactgctctacaacgactagggactcaaaaagagttgggggaattggtgacgtttttggcatctggctcttgtgattatttgactggccaggtgttttggttggcaggcggctttcccgtcatcgaacgttggcccggcatgcccgaataatgaggatcc

SEQ ID NO: 464 - protein, 254 aa, Artificial Sequence; identical to SEQ ID NO: 462
  HHDH variant

SEQ ID NO: 465 - DNA, 774 bp, Artificial
  HHDH variant
  CDS (1)..(774)
atgagcaccgctattgtcaccaacgtcaaacattttgggggtatgggtagcgctctgcgtctgagcgaagctggtcataccgtcgcttgccatgatgaaagctttaagcatcaggatgaactagaagcttttgctgaaacctacccacagctgataccagtgagcgaacaggaaccagctgaactgattgaagctgtcaccagcgctcttggtcatgtcgatgtcctggtcagcaacgatatcgcgcctgtggaatggcggccaatcgataaatacgctgtcgaggattacagggatactgtcgaagctctgcagatcaagccatttgctctagtgaatgctgtcgcttcgcaaatgaagaagcgaaagtcggggcacatcatcttcatcacttcggctgccccgttcgggccatggaaggagctatcgacttactcttcggctcgagctgggactagtgcactagctaatgctctatcgaaggagctaggagagtacaatatcccggtgttcgctatcgctccgaattacctacactcgggggattcgccgtactattacccctctgagccgtggaagacttctccggagcacgtggctcacgtgcgtaaggtgactgctctacaacgactagggactcaaaaagagttgggggaattggtgacgtttttggcatctggctcttgtgattatttgactggccaggtgttttggttggcaggcggctttcccgtcatcgaacgttggcccggcatgcccgaataatgaggaccc

SEQ ID NO: 466 - protein, 254 aa, Artificial
  HHDH variant
MSTAIVTNVKHFGGMGSALRLSEAGHTVACHDESFKHQDELEAFAETYPQLIPVSEQEPAELIEAVTSALGHVDVLVSNDIAPVEWRPIDKYAVEDYRDTVEALQIKPFALVNAVASQMKKRKSGHIIFITSAAPFGPWKELSTYSSARAGTSALANALSKELGEYNIPVFAIAPNYLHSGDSPYYYPSEPWKTSPEHVAHVRKVTALQRLGTQKELGELVTFLASGSCDYLTGQVFWLAGGFPVIERWPGMPE

SEQ ID NO: 467 - DNA, 768 bp, Artificial Sequence
  HHDH variant
  CDS (1)..(768)
atgagcgccgctattgtcaccaacgtcaaacattttggaggtatgggtagcgctctgcgtctgagcgaagctggttataccgtcgcttgccatgatgaaagctttaagcatcaggatgaactggaagcttttgctgaaacctacccacagctgataccagtgagcgaacaggaaccaactgaactgattgaagctgtcaccggtgctcttggtcaggtcgatgtcctggtcagcaacgatatctatcctgtggaatggcggccaatcgataaatacgctgtcgaggattacaggggtactgtcgaagctctgcagatcaagccatttgctctagtgaatgctgtcgcttcgcaaatgaagaagcgaaagtcggggcacatcatcttcatcacttcggctgccccgttcgggccatggaaggagctatcgacttactcttcggctcgagctggggctagtgcactagctaatgctctatcgaaggagctaggagagtacaatatcccggtgttcgctatcgctccgaattacctacactcgggggattcgccgtactattacccctctgagccgtggaagacttctccggagcacgtggctcacgtgcgtaaggtgactgctctacaacgactagggactcaacgcgagttgggggaattggtggcatttttggcatctggctcttgtgattatttgactggccaggtgttttggttggcaggcggctttcccgtcatcgaacgttggcccggcatgcccgaataatga

SEQ ID NO: 468 - protein, 254 aa, Artificial Sequence
  HHDH variant
MSAAIVTNVKHFGGMGSALRLSEAGYTVACHDESFKHQDELEAFAETYPQLIPVSEQEPTELIEAVTGALGQVDVLVSNDIYPVEWRPIDKYAVEDYRGTVEALQIKPFALVNAVASQMKKRKSGHIIFITSAAPFGPWKELSTYSSARAGASALANALSKELGEYNIPVFAIAPNYLHSGDSPYYYPSEPWKTSPEHVAHVRKVTALQRLGTQRELGELVAFLASGSCDYLTGQVFWLAGGFPVIERWPGMPE

SEQ ID NO: 469 - DNA, 774 bp, Artificial Sequence
  HHDH variant
  CDS (1)..(774)
atgggccccgttatggtcactaacgtcaaacattttggtggtaagggtagcgctctgaggctgagcgaagctggtcataccgtcgcttgccatgatgaaagctttaaacagaaagatgaactggaagcttttgctgaaacctacccacagctgaaaccagtgagcgaacaggaaccagctgaactgatcgaagctgtcaccagcgcttacggtcaggtcgatgtcctggtcagcaacgatatctttgctccagaatttcagccaatcgataaatacgctgtcgaagattacaggggtgctgtcgaagctctgcagatcaggccatttgctctagtgaatgctgtggcttcgcaaatgaagaagcgaaagtcggggcacatcatcttcatcacttcggctactccgttcgggccgtggaaggagctatcgacttacacttcggctcgagctggggcttgtactctagctaatgctctatcgaaggagctaggagagtacaatatcccggtgttcgctatcgggccgaattacctacactcggaggattcgccgtacttctacccgactgagccgtggaagactaatccggagcacgtggctcacgtgaagaaagtgactgctctacaacgactagggactcaaaaagagttgggggaattggtggcatttttggcatctggctcttgtgattatttgacgggccaggtgttttggttggcaggcggcttctccaagaaaaaaagttggcccggcttgcccgaataatgaggatcc

SEQ ID NO: 470 - protein, 254 aa, Artificial Sequence
  HHDH variant
MGPVMVTNVKHFGGKGSALRLSEAGHTVACHDESFKQKDELEAFAETYPQLKPVSEQEPAELIEAVTSAYGQVDVLVSNDIFAPEFQPIDKYAVEDYRGAVEALQIRPFALVNAVASQMKKRKSGHIIFITSATPFGPWKELSTYTSARAGACTLANALSKELGEYNIPVFAIGPNYLHSEDSPYFYPTEPWKTNPEHVAHVKKVTALQRLGTQKELGELVAFLASGSCDYLTGQVFWLAGGFSKKKSWPGLPE

SEQ ID NO: 471 - DNA, 774 bp, Artificial Sequence
  HHDH variant
  CDS (1)..(774)
atgagcaccgctatcgtcactaacgtcaaacattttggtggtatgggtagcgctctgaggctgagcgaagctggtcataccgtcgcttgccatgatgaaagctttaaacagaaagatgaactggaagcttttgctgaaacctacccacagctgcgtccgatgcgtgatcaggaaccaccggacctgatcgaagctgtcaccagcgcttacggtcaggtcgatgtcctggtcagcaacgatatctttgctccagaatttcagccaatcgataaatacgctgtcgaagattacaggggtgctgtcgaagctctgcagatcaggccatttgctctagtgaatgctgtggcttcgcaaatgaagaagcgaaagtcggggcacatcatcttcatcacttcggctactccgttcgggccgtggaaggagctatcgacttacacttcggctcgagctggggcttgtactctagctaatgctctatcgaaggagctaggagagtacaatatcccggtgttcgctatcgggccgaattacctacactcggaggattcgccgtacttctacccgactgagccgtggaagactaatccggagcacgtggctcacgtgaagaaggtgactgctctacaacgactagggactcaaaaagagttgggggaattggtggcatttttggcatctggctcttgtgattatttgactggccaggtgttttggttggcaggcggctttcccatgatagaacgttggcccggcatgcccgaataatgaggatcc

SEQ ID NO: 472 - protein, 254 aa, Artificial Sequence
  HHDH variant
MSTAIVTNVKHFGGMGSALRLSEAGHTVACHDESFKQKDELEAFAETYPQLRPMRDQEPPDLIEAVTSAYGQVDVLVSNDIFAPEFQPIDKYAVEDYRGAVEALQIRPFALVNAVASQMKKRKSGHIIFITSATPFGPWKELSTYTSARAGACTLANALSKELGEYNIPVFAIGPNYLHSEDSPYFYPTEPWKTNPEHVAHVKKVTALQRLGTQKELGELVAFLASGSCDYLTGQVFWLAGGFPMIERWPGMPE

SEQ ID NO: 473 - DNA, 774 bp, Artificial Sequence
  HHDH variant
  CDS (1)..(774)
atgagcaccgctattgtcaccaacgtcaaacattttggaggtatgggtagcgctctgcgtctgagcgaagctggtcataccgtcgcttgccatgatgaaagctttaagcatcaggatgaactagaagcttttgctgaaacctacccacagctgataccaatgagcgatcaggaaccagctgaactgattgaagctgtcaccagcgctcttggtcatgtcgatgtcctggtcagcaacgatatcgcgcctgtggaatggcggccaatcgataaatacgctgtcgaggattacagggatactgtcgaagctctgcagatcaagccatttgctctagtgaatgctgtcgcttcgcaaatgaagaagcgaaagtcggggcacatcatcttcatcacttcggctgccccgttcggaccatggaaggagctatcgacttactcttcggctcgagctggggctagtgcactagctaatgctctatcgaaggagctaggagagtacaatatcccggtgttcgctatcgctccgaattacctacattcgggggattcgccgtactattacccctctgagccgtggaagacttctcctgagcacgtggctcacgtgcgtaaggtgactgctctacaacgactagggactcaaaaagagttgggggaattggtgacgtttttggcatctggctcttgtgattatttgactggccaggtgttttggttggcaggcggctttcccgtcatcgaacgttggcccggcatgcctgaataatgaggatcc

SEQ ID NO: 474 - protein, 254 aa, Artificial Sequence
  HHDH variant
MSTAIVTNVKHFGGMGSALRLSEAGHTVACHDESFKHQDELEAFAETYPQLIPMSDQEPAELIEAVTSALGHVDVLVSNDIAPVEWRPIDKYAVEDYRDTVEALQIKPFALVNAVASQMKKRKSGHIIFITSAAPFGPWKELSTYSSARAGASALANALSKELGEYNIPVFAIAPNYLHSGDSPYYYPSEPWKTSPEHVAHVRKVTALQRLGTQKELGELVTFLASGSCDYLTGQVFWLAGGFPVIERWPGMPE

SEQ ID NO: 475 - DNA, 768 bp, Artificial Sequence
  HHDH variant
  CDS (1)..(768)
atgagcgccggtatcgtcaccatcgtcaaacattttggtggtatgggaagccctctgaggctgatcgaagctggtcataccgtcgcttgccatgaggaaagctttaatcagaaagatgatctggaagcttttggtgatacctgcccacagctgaaaccaatgagggatcagggaccagctgatctgatcgaagctgtcaccagcgcttacggtcaggtcgatgtcctggtcagcaacgatatctttgctccagaatttcagccaatcgataaatacgctgtcgaagattacaggggtgctgtcgaagctctgcagatcaggccatttgctctagtgaatgctgtggcttcgcaaatgaagaagcgaaagtcggggcacatcatcttcatcacttcggctactccgttcgggccgtggaaggagctatcgacttacacttcggctcgagctggggcttgtactctagctaatgctctatcgaaggagctaggagagtacaatatcccggtgttcgctatcgggccgaattacctacactcggaggattcgccgtacttctacccgactgagccgtggaagactaatccggagcacgtggctcacgtgaagaaggtgactgctctacaacgactagggactcaaaaagagttgggggaattggtggcatttttggcatctggctcttgtgattatttgactggccaggtgttttggttggcaggcggctttcccatgatagaacgttggcccggcatgcccgaataatga

SEQ ID NO: 476 - protein, 254 aa, Artificial Sequence
  HHDH variant
MSAGIVTIVKHFGGMGSPLRLIEAGHTVACHEESFNQKDDLEAFGDTCPQLKPMRDQGPADLIEAVTSAYGQVDVLVSNDIFAPEFQPIDKYAVEDYRGAVEALQIRPFALVNAVASQMKKRKSGHIIFITSATPFGPWKELSTYTSARAGACTLANALSKELGEYNIPVFAIGPNYLHSEDSPYFYPTEPWKTNPEHVAHVKKVTALQRLGTQKELGELVAFLASGSCDYLTGQVFWLAGGFPMIERWPGMPE

SEQ ID NO: 477 - DNA, 768 bp, Artificial Sequence
  HHDH variant
  CDS (1)..(768)
atgagcaccgctattgtcaccaacgtcaaacattttggaggtatgggtagcgctctgcgtctgagcgaagctggtcataccgtcgcttgccatgatgaaagctttaagcatcaggataaactggaagcttttgctgaaacctacccacagctgataccaatgagcaaacagaaaccagctaaactgattgaagctgtcaccagcgctcttggtcaggtcgatgtcctggtcagcaacgatatcgctgctgtggaatggcggccaatcgataaatacgctgtcgaggattacaggggtactgtcgaagctctgcagatcaagccatttgctctagtgaatgctgtcgcttcgcaaatgaagaagcgaaagtcggggcacatcatcttcatcacttcggctgccccgttcgggccatggaaggagctatcgacttactcttcggctcgagctggggctagtgcactagctaatgctctatcgaaggagctaggagagtacaatatcccagtgttcgctatcgctccgaattacctacactcggaggattcgccgtactattacccctctgagccgtggaagacttctccggagcacgtggctcacgtgcgtaaggtgactgctctacaacgactagggactcaaaaagagttgggggaattggtgacattttcggcatctggctcttgtgattatttgactggccaggtgttttggttggcaggcggctttcccgtcatcgaacgttggcccggcatgcccgaataatga

SEQ ID NO: 478 - protein, 254 aa, Artificial Sequence
  HHDH variant
MSTAIVTNVKHFGGMGSALRLSEAGHTVACHDESFKHQDKLEAFAETYPQLIPMSKQKPAKLIEAVTSALGQVDVLVSNDIAAVEWRPIDKYAVEDYRGTVEALQIKPFALVNAVASQMKKRKSGHIIFITSAAPFGPWKELSTYSSARAGASALANALSKELGEYNIPVFAIAPNYLHSEDSPYYYPSEPWKTSPEHVAHVRKVTALQRLGTQKELGELVTFSASGSCDYLTGQVFWLAGGFPVIERWPGMPE

SEQ ID NO: 479 - DNA, 768 bp, Artificial Sequence
  HHDH variant
  CDS (1)..(768)
atgagcaccgctattgtcaccaacgtcaaacattttggaggtatgggtagcgctctgcgtctgagcgaagctggtcataccgtcgcttgccatgatgaaagctttaagcatcaggataaactggaagcttttgctgaaacctacccacagctgataccaatgagcaaacagaaaccagctgaactgattgaagctgtcaccagcgctcttggtcaggtcgatgtcctggtcagcaacgatatcgctgctgtggaatggcggccaatcgataaatacgctgtcgaggattacaggggtactgtcgaagctctgcagatcaagccatttgctctagtgaatgctgtcgcttcgcaaatgaagaagcgaaagtcggggcacatcatcttcatcacttcggctgccccgttcgggccatggaaggagctatcgacttactcttcggctcgagctggggctagtgcactagctaatgctctatcgaaggagctaggagagtacaatatcccggtgttcgctatcgctccgaattacctacactcggaggattcgccgtactattacccctctgagccgtggaagacttctccggagcacgtggctcacgtgcgtaaggtgactgctctacaacgactagggactcaaaaagagttgggggaattggtgacatttttggcatctggctcttgtgattatttgactggccaggtgttttggttggcaggcggctttcccgtcatcgaacgttggcccggcatgcccgaataatga

SEQ ID NO: 480 - protein, 254 aa, Artificial Sequence
  HHDH variant
MSTAIVTNVKHFGGMGSALRLSEAGHTVACHDESFKHQDKLEAFAETYPQLIPMSKQKPAELIEAVTSALGQVDVLVSNDIAAVEWRPIDKYAVEDYRGTVEALQIKPFALVNAVASQMKKRKSGHIIFITSAAPFGPWKELSTYSSARAGASALANALSKELGEYNIPVFAIAPNYLHSEDSPYYYPSEPWKTSPEHVAHVRKVTALQRLGTQKELGELVTFLASGSCDYLTGQVFWLAGGFPVIERWPGMPE

SEQ ID NO: 481 - DNA, 768 bp, Artificial Sequence
  HHDH variant
  CDS (1)..(768)
atgagcaccgctattgtcaccaacgtcaaacattttggaggtatgggtagcgctctgcgtctgagcgaagctggtcataccgtcgcttgccatgatgaaagctttaagcatcaggatgaactgaaagcttttgctaaaacctacccacagctgataccaatgagccaacagaaaccagctaaactgattcaagctgtcaccagcgctcttggtcaggtcgatgtcctggtcagcaacgatatcgctgctgtggaatggcggccaatcgataaatacgctgtcgaggattacaggggtactgtcgaagctctgcagatcaagccatttgctctagtgaatgctgtcgcttcgcaaatgaagaagcgaaagtcggggcacatcatcttcatcacttcggctgccccgttcgggccatggaaggagctatcgacttactcttcggctcgagctggggctagtgcactagctaatgctctatcgaaggagctaggagagtacaatatcccggtgttcgctatcgctccgaattacctacactcggaggattcgccgtactattacccctctgagccgtggaagacttctccggagcacgtggctcacgtgcgtaaggtgactgctctacaacgactagggactcaaaaagagttgggggaattggtgacatttttggcatctggctcttgtgattatttgactggccaggtgttttggttggcaggcggctttcccgtcatcgaacgttggcccggcatgcccgaataatga

SEQ ID NO: 482 - protein, 254 aa, Artificial Sequence
  HHDH variant
MSTAIVTNVKHFGGMGSALRLSEAGHTVACHDESFKHQDELKAFAKTYPQLIPMSQQKPAKLIQAVTSALGQVDVLVSNDIAAVEWRPIDKYAVEDYRGTVEALQIKPFALVNAVASQMKKRKSGHIIFITSAAPFGPWKELSTYSSARAGASALANALSKELGEYNIPVFAIAPNYLHSEDSPYYYPSEPWKTSPEHVAHVRKVTALQRLGTQKELGELVTFLASGSCDYLTGQVFWLAGGFPVIERWPGMPE

SEQ ID NO: 483 - DNA, 768 bp, Artificial Sequence
  HHDH variant
  CDS (1)..(768)
atgagcaccgctattgtcaccaacgtcaaacattttggaggtatgggtagcgctctgcgtctgagcgaagctggtcataccgtcgcttgccatgatgaaagctttaagcatcaggatgaactggaagcttttgctgaaacctacccacagctgataccaatgagccaacagaaaccagctgaactgattgaagctgtcaccagcgctcttggtcaggtcgatgtcctggtcagcaacgatatcgctgctgtggaatggcggccaatcgataaatacgctgtcgaggattacaggggtactgtcgaagctctgcagatcaagccatttgctctagtgaatgctgtcgcttcgcaaatgaagaagcgaaagtcggggcacatcatcttcatcacttcggctgccccgttcgggccatggaaggagctatcgacttactcttcggctcgagctggggctagtgcactagctaatgctctatcgaaggagctaggagagtacaatatcccggtgttcgctatcgctccgaattacctacactcggaggattcgccgtactattacccctctgagccgtggaagacttctccggagcacgtggctcacgtgcgtaaggtgactgctctacaacgactagggactcaaaaagagttgggggaattggtgacatttttggcatctggctcttgtgattatttgactggccaggcgttttggttggcaggcggctttcccgtcatcgaacgttggcccggcatgcccgaataatga

SEQ ID NO: 484 - protein, 254 aa, Artificial Sequence
  HHDH variant
MSTAIVTNVKHFGGMGSALRLSEAGHTVACHDESFKHQDELEAFAETYPQLIPMSQQKPAELIEAVTSALGQVDVLVSNDIAAVEWRPIDKYAVEDYRGTVEALQIKPFALVNAVASQMKKRKSGHIIFITSAAPFGPWKELSTYSSARAGASALANALSKELGEYNIPVFAIAPNYLHSEDSPYYYPSEPWKTSPEHVAHVRKVTALQRLGTQKELGELVTFLASGSCDYLTGQAFWLAGGFPVIERWPGMPE

SEQ ID NO: 485 - DNA, 768 bp, Artificial Sequence
  HHDH variant
  CDS (1)..(768)
atgagcaccgctattgtcaccaacgtcaaacattttggaggtatgggtagcgctctgcgtctgagcgaagctggtcataccgtcgcttgccatgatgaaagctttaagcatcaggatgaactggaagcttttgctgaaacctacccacagctgataccaatgagcgaacagaaaccagctaaactgattaaagctgtcaccagcgctcttggtcaggtcgatgtcctggtcagcaacgatatcgctgctgtggaatggcggccaatcgataaatacgctgtcgaggattacaggggtactgtcgaagctctgcagatcaagccatttgctctagtgaatgctgtcgcttcgcaaatgaagaagcgaaagtcggggcacatcatcttcatcacttcggctgccccgttcgggccatggaaggagctatcgacttactcttcggctcgagctggggctagtgcactagctaatgctctatcgaaggagctaggagagtacaatatcccggtgttcgctatcgctccgaattacctacactcggaggattcgccgtactattacccctctgagccgtggaagacttctccggagcacgtggctcacgtgcgtaaggtgactgctctacaacgactagggactcaaaaagagttgggggaattggtgacatttttggcatctggctcttgtgattatttgactggccaggtgttttggttggcaggcggctttcccgtcatcgaacgttggcccggcatgcccgaataatga

SEQ ID NO: 486 - protein, 254 aa, Artificial Sequence
  HHDH variant
MSTAIVTNVKHFGGMGSALRLSEAGHTVACHDESFKHQDELEAFAETYPQLIPMSEQKPAKLIKAVTSALGQVDVLVSNDIAAVEWRPIDKYAVEDYRGTVEALQIKPFALVNAVASQMKKRKSGHIIFITSAAPFGPWKELSTYSSARAGASALANALSKELGEYNIPVFAIAPNYLHSEDSPYYYPSEPWKTSPEHVAHVRKVTALQRLGTQKELGELVTFLASGSCDYLTGQVFWLAGGFPVIERWPGMPE

SEQ ID NO: 487 - DNA, 768 bp, Artificial Sequence
  HHDH variant
  CDS (1)..(768)
atgagcaccgctattgtcaccaacgtcaaacattttggaggtatgggtagcgctctgcgtctgagcgaagctggtcataccgtcgcttgccatgatgaaagttttaagcatcaggatgaactggaagcttttgctgaaacctacccacagctgatgccaatgagcgaacagaaaccagctcaactgattcaagctgtcaccagcgctcttggtcaggtcgatgtcctggtcagcaacgatatcgctgctgtggaatggcggccaatcgataaatacgctgtcgaggattacaggggtactgacgaagctctgcagttcaagccatttgctctagtgaatgctgtcgcttcgcaaatgaagaagcgaaagtcggggcacatcatcttcatcacttcggctgccccgttcgggccatggaaggagctatcgactcactcttcggctcgagctggggctagtgcactagctaatgctctatcgaaggagctaggagagtacaatatcccggtgttcgctatcgctccgaattacctatactcggaggattcgccgtactattacccctctgagccgtggaagacttctccggagcacgtggctcacgtgcgtaaggtgactgctctacaacgactagggactcaaaaagagttgggggaattggtgacatttttggcatctggctcttgtgattatttgactggccaggtgttttggttggcaggcggctttcccgtcatcgaacgttggcccggcatgcccgaataatga

SEQ ID NO: 488 - protein, 254 aa, Artificial Sequence
  HHDH variant
MSTAIVTNVKHFGGMGSALRLSEAGHTVACHDESFKHQDELEAFAETYPQLMPMSEQKPAQLIQAVTSALGQVDVLVSNDIAAVEWRPIDKYAVEDYRGTDEALQFKPFALVNAVASQMKKRKSGHIIFITSAAPFGPWKELSTHSSARAGASALANALSKELGEYNIPVFAIAPNYLYSEDSPYYYPSEPWKTSPEHVAHVRKVTALQRLGTQKELGELVTFLASGSCDYLTGQVFWLAGGFPVIERWPGMPE

SEQ ID NO: 489 - DNA, 768 bp, Artificial Sequence
  HHDH variant
  CDS (1)..(768)
atgagcaccgctatcgtcaccaacgtcaaacattttggaggtatgggtagcgctctgaggctgagcgaagctggtcacaccgtcgcttgccatgatgaaagctttaaacagaaagatgaactggaggcttttgctgaaacctacccacagctgaaaccaatgagcgaacaggaaccagctgaactggttgaagctgtcaccagcgcttacggtcaggtcgatgtcctggtcagcaacgatatctttgctccagaatttcagccaatcgataaatacgctgtcgaagattacaggggtgctgtcgaagctctgcagatcaggccatttgctctagtgaatgctgtggcttcgcaaatgaagaagcgaaagtcggggcacatcatcttcatcacttcggctactccgttcgggccatggaaggagctatcgacttacacttcggctcgagctggggcttgtactctagctaatgctctatcgaaggagctaggagagtacaatatcccggtgttcgctatcgggccgaattacctacactcggaggattcgccgtacttctacccgactgagccgtggaagactaatccggagcacgtggctcacgtgaagaaggtgactgctctacaacgactagggactcaaaaagagttgggggaattggtggcatttttggcatctggctcttgtgattatttgactggccaggtgttttggttggcaggcggctttcccatgatagaacgttggcctggcatgcccgaataatga

SEQ ID NO: 490 - protein, 254 aa, Artificial Sequence
  HHDH variant
MSTAIVTNVKHFGGMGSALRLSEAGHTVACHDESFKQKDELEAFAETYPQLKPMSEQEPAELVEAVTSAYGQVDVLVSNDIFAPEFQPIDKYAVEDYRGAVEALQIRPFALVNAVASQMKKRKSGHIIFITSATPFGPWKELSTYTSARAGACTLANALSKELGEYNIPVFAIGPNYLHSEDSPYFYPTEPWKTNPEHVAHVKKVTALQRLGTQKELGELVAFLASGSCDYLTGQVFWLAGGFPMIERWPGMPE

SEQ ID NO: 491 - DNA, 768 bp, Artificial Sequence
  HHDH variant
  CDS (1)..(768)
atgagcaccgctatcgtcaccaacgtcaaacattttggaggtatgggtagcgctctgaggctgtcgcaggctggtcacaccgtcgcttgccatgatgaaagctttaaacagaaagatgaactggaggcttttgctgaaacctacccacagctgaaaccaatgagcgaacaggaaccagctgaactggttgaagctgtcaccagcgcttacggtcaggtcgatgtcctggtcagcaacgatatctttgctccagaatttcagccaatcgataaatacgctgtcgaagattacaggggtgctgtcgaagctctgcagatcaggccatttgctctagtgaatgctgtggcttcgcaaatgaagaagcgaaagtcggggcacatcatcttcatcacttcggctactccgttcgggccatggaaggagctatcgacttacacttcggctcgagctggggcttgtactctagctaatgctctatcgaaggagctaggagagtacaatatcccggtgttcgctatcgggccgaattacctacactcggaggattcgccgtacttctacccgactgagccgtggaagactaatccggagcacgtggctcacgtgaagaaggtgactgctctacaacgactagggactcaaaaagagttgggggaattggtggcatttttggcatctggctcttgtgattatttgactggccaggtgttttggttggcaggcggctttcccatgatagaacgttggcccggcatgcccgaataatga

SEQ ID NO: 492 - protein, 254 aa, Artificial Sequence
  HHDH variant
MSTAIVTNVKHFGGMGSALRLSQAGHTVACHDESFKQKDELEAFAETYPQLKPMSEQEPAELVEAVTSAYGQVDVLVSNDIFAPEFQPIDKYAVEDYRGAVEALQIRPFALVNAVASQMKKRKSGHIIFITSATPFGPWKELSTYTSARAGACTLANALSKELGEYNIPVFAIGPNYLHSEDSPYFYPTEPWKTNPEHVAHVKKVTALQRLGTQKELGELVAFLASGSCDYLTGQVFWLAGGFPMIERWPGMPE

SEQ ID NO: 493 - DNA, 774 bp, Artificial Sequence
  HHDH variant
  CDS (1)..(774)
atgagcaccgctatcgtcaccaacgtcaaacattttggaggtatgggtagcgctctgaggctgtcggaggctggtcacaccgtcgcttgccatgatgaaagctttaaacagaaagatgaactggaagcttttgctgaaacctacccacagctgaaaccaatgagcgaacaggaaccagctgaactggttgaagctgtcaccagcgcttacggtcaggtcgatgtcctggtcagcaacgatatctttgctccagaatttcagccaatcgataaatacgctgtcgaagattacaggggtgctgtcgaagctctgcagatcaggccatttgctctagtgaatgctgtggctccgcaaatgaagaagcgaaagtcggggcacatcatcttcatcacttcggctactccgttcgggccatggaaggagctatcgacttacacttcggctcgagctggggcttgtactctagctaatgctctatcgaaggagctaggagagtacaatatcccggtgttcgctatcgggccgaattacctacactcggaggattcgccgtacttctacccgactgagccgtggaagactaatccggagcacgtggctcacgtgaagaaggtgactgctctacaacgactagggactcaaaaagagttgggggaattggtggcatttttggcatctggctcttgtgattatttgactggccaggtgttttggttggcaggcggctttcccatgatagaacgttggcccggcatgcccgaataatgaggatcc

SEQ ID NO: 494 - protein, 254 aa, Artificial Sequence
  HHDH variant
MSTAIVTNVKHFGGMGSALRLSEAGHTVACHDESFKQKDELEAFAETYPQLKPMSEQEPAELVEAVTSAYGQVDVLVSNDIFAPEFQPIDKYAVEDYRGAVEALQIRPFALVNAVAPQMKKRKSGHIIFITSATPFGPWKELSTYTSARAGACTLANALSKELGEYNIPVFAIGPNYLHSEDSPYFYPTEPWKTNPEHVAHVKKVTALQRLGTQKELGELVAFLASGSCDYLTGQVFWLAGGFPMIERWPGMPE

SEQ ID NO: 495 - DNA, 768 bp, Artificial Sequence
  HHDH variant
  CDS (1)..(768)
atgagcaccgctattgtcaccaacgtcaaacattttggaggtatgggtagcgctctgcgtctgagcgaagctggtcataccgtcgcttgccatgatgaaagctttaagcatcaggatgaactagaagcttttgctgaaacctacccacagctgataccaatgagcgagcaggaaccagctgaactggttgaagctgtcaccagcgctcttggtcatgtcgatgtcctggtcagcaacgatatcgcgcctgtggaatggcggccaatcgataaatacgctgtcgaggattacagggatactgtcgaagctctgcagatcaagccatttgctctagtgaatgctgtcgcttcgcaaatgaagaagcgaaagtcggggcacatcatcttcatcacttcggctgccccgttcgggccatggaaggagctatcgacttactcttcggctcgagctggggctagtgcactagctaatgctctatcgaaggagctaggagagtacaatatcccggtgttcgctatcgctccgaattacctacactcgggggattcgccgtactattacccctctgagccgtggaagacttctccggagcacgtggctcacgtgcgtaaggtgactgctctacaacgactagggactcaaaaagagttgggggaattggtgacgtttttggcatctggctcttgtgattatttgactggccaggtgttttggttggcaggcggctttcccgtcatcgaacgttggcccggcatgcccgaataatga

SEQ ID NO: 496 - protein, 254 aa, Artificial Sequence
  HHDH variant
MSTAIVTNVKHFGGMGSALRLSEAGHTVACHDESFKHQDELEAFAETYPQLIPMSEQEPAELVEAVTSALGHVDVLVSNDIAPVEWRPIDKYAVEDYRDTVEALQIKPFALVNAVASQMKKRKSGHIIFITSAAPFGPWKELSTYSSARAGASALANALSKELGEYNIPVFAIAPNYLHSGDSPYYYPSEPWKTSPEHVAHVRKVTALQRLGTQKELGELVTFLASGSCDYLTGQVFWLAGGFPVIERWPGMPE

SEQ ID NO: 497 - DNA, 774 bp, Artificial Sequence
  HHDH variant
  CDS (1)..(774)
atgagcacctctattgtcaccaacgtcaaacattttggaggtatgggtagcgctctgcgtctgagcgaagctggtcataccgtcgcttgccatgatgaaagctttaggcatcaggatgaactagaagcttttgctgaaacctacccacagctgataccaatgagcgaacaggaaccagctgaactggttgaagctgtcaccagcgctcttggtcatgtcgatgtcctggtcagcaacgagatcgcgcctgtggaatggcggccaatcgatagatacgctgtcgaggattacagggatactgtcgaagctctgcagatcaagccatttgctctagtgaatgctgtcgcttcgcaaatgaagaagcgaaagtcggggcacatcatcttcatcacttcggctgccccattcgggccatggaaggagctatcgacttactcttcggctcgagctggggctagtgcactagctaatgctctatcgaaggagctaggagagtacaatatcccggtgttcgctatcgctccgaattacctacactcgggggattcgccgtactattacccctctgagccgtggaagacttctccggagcacgtggctcacgtgcgtaaggtgactgctctacaacgactagggactcaaaaagagttgggggaattggtgacgtttttggcatctggctcttgtgattatttgactggccaggtgttttggttggcaggcggctttcccgtcatcgaacgttggcccggcatgcccgaataatgaggatcc

SEQ ID NO: 498 - protein, 254 aa, Artificial Sequence
  HHDH variant
MSTSIVTNVKHFGGMGSALRLSEAGHTVACHDESFRHQDELEAFAETYPQLIPMSEQEPAELVEAVTSALGHVDVLVSNEIAPVEWRPIDRYAVEDYRDTVEALQIKPFALVNAVASQMKKRKSGHIIFITSAAPFGPWKELSTYSSARAGASALANALSKELGEYNIPVFAIAPNYLHSGDSPYYYPSEPWKTSPEHVAHVRKVTALQRLGTQKELGELVTFLASGSCDYLTGQVFWLAGGFPVIERWPGMPE

SEQ ID NO: 499 - DNA, 774 bp, Artificial Sequence
  HHDH variant
  CDS (1)..(774)
atgagcaccgctaccgtcaccaacgtcaaacattttggaggtatgggtagcgctctgaagctgagcgaagctggtcataccgtcgcttgccatgatgaaagctttaaacagaaagatgaactggaagcttttgctgaagcctacccacagctgaaaccaatgagcgaacaggatccagctgacctgattgaagctgtcaccagcgcttacggtcaggtcgatgtcctggtcagcaacgatatctttgctccagaatttcagccaatcgataaatacgctgtcgaagattacaggggtgctgtcgaagctctgcagatcaggccatttgctctagtgaatgctgtggcttcgcaaatgaagaaacgaaagtcggggcacatcatcttcatcacttcggctactccgttcgggccatggaaagagctatcgacttacacttcggctcgagctggggcttgtactctggctaatgctctatcgaaggagctaggagagtacaatatcccggtgttcgctatcgggccgaattacctacactcggaggattcgccgtacttctacccgactgagccgtggaagactaatccggagcacgtggctcacgtgaagaaggtgactgctctacaacgattagggactcaaaaagagttgggggaattggtggcattcctggcatctggctcttgtgattatttgactggccaggtgttttggttggcaggcggctttcccctaatagaacgttggcccggcatgcccgaataatgaggatcc

SEQ ID NO: 500 - protein, 254 aa, Artificial Sequence
  HHDH variant
MSTATVTNVKHFGGMGSALKLSEAGHTVACHDESFKQKDELEAFAEAYPQLKPMSEQDPADLIEAVTSAYGQVDVLVSNDIFAPEFQPIDKYAVEDYRGAVEALQIRPFALVNAVASQMKKRKSGHIIFITSATPFGPWKELSTYTSARAGACTLANALSKELGEYNIPVFAIGPNYLHSEDSPYFYPTEPWKTNPEHVAHVKKVTALQRLGTQKELGELVAFLASGSCDYLTGQVFWLAGGFPLIERWPGMPE

SEQ ID NO: 501 - DNA, 765 bp, Artificial Sequence
  HHDH variant
  CDS (1)..(765)
atgagcaccgctatcgtcaccaacgtcaaacattttggaggtatgggtagcgctctgaggctgagcgaagctggtcataccgtcgcttgccatgatgaaagctttaaacagaaagatgaactggaagcttttgctgaaacctacccacagctgaaaccaatgagcgaacaggaaccagctgaactgatcgaagctgtcaccagcgcttacggtcaggtcgatgtcctggtcagcaacgatatctttgctccagaatttcagccaatcgataaatacgctgtcgaaaactacaggggtgctgtcgaagctctgcagatcaggccatttgctctagtgaatgctgtggcttcgcaaatgaagaagcgaaagtcggggcacatcatcttcatcacttcggctactccgttcgggccatggaaagagctatcgacttacacttcggctcgagctggggcttgtactctagctaatgctctatcgaaggagctaggagagtacaatatcccggtgttcgctatcgggccgaattacctacactcggaggattcgccgtacttctacccgactgagccgtggaagactaatccggagcacgtggctcacgtgaagaaggtgactgctctacaacgactagggactcaaaaagagttgggggaattggtggcatttttggcatctggctcttgtgattatttgactggccaggtgttttggttggcaggcggctttcccattatcgaacgttggcccggcatgcccgaataa

SEQ ID NO: 502 - protein, 254 aa, Artificial Sequence; identical to SEQ ID NO: 56
  HHDH variant

SEQ ID NO: 503 - DNA, 696 bp, Artificial Sequence
  HHDH variant
  CDS (1)..(696)
atgagcaccgctatcgtcaccaacgtcaaacattttggaggtatgggtagcgctctgaggctgagcgaagctggtcataccgtcgcttgccatgatgaaagctttaaacagaaagatgaactggaagcttttgctgaaacctacccacagctgaaaccaatgagcgaacaggaaccagctgaactgatcgaagctgtcaccagcgcttacggtcaggtcgatgtcctggtcagcaacgatatctttgctccagaatttcagccaatcgataaatacgctgtcgaagattacaggggtgctgtcgaagctctgcagatcaggccatttgctctagtgaatgctgtggcttcgcaaatgaagaagcgaaagtcggggcacatcatcttcatcacttcggctactccgttcgggccatggaaggagctatcgacttacacttcggctcgagctggggcttgtactctagctaatgctctatcgaaggagctaggagagtacaatatcccggtgttcgctatcgggccgaattacctacactcggaggattcgccgtacttctacccgactgagccgtggaagactaatccggagcacgtggctcacgtgaagaaggtgactgccctacaacgactagggactcaaaaagagttgggggaattggtggcatttttggcatctggctcttgtgattttctg

SEQ ID NO: 504 - protein, 232 aa, Artificial Sequence
  HHDH variant
MSTAIVTNVKHFGGMGSALRLSEAGHTVACHDESFKQKDELEAFAETYPQLKPMSEQEPAELIEAVTSAYGQVDVLVSNDIFAPEFQPIDKYAVEDYRGAVEALQIRPFALVNAVASQMKKRKSGHIIFITSATPFGPWKELSTYTSARAGACTLANALSKELGEYNIPVFAIGPNYLHSEDSPYFYPTEPWKTNPEHVAHVKKVTALQRLGTQKELGELVAFLASGSCDFL

SEQ ID NO: 505 - DNA, 765 bp, Artificial Sequence
  HHDH variant
  CDS (1)..(765)
atgagcaccgctatcgtcaccaacgtcaaacattttggaggtatgggtagcgctctgaggctgagcgaagctggtctgaccgtcgcttgccatgatgaaagctttaaacagaaagatgaactggaagcttttgctggaacctacccacagctgaaaccaatgagcgaacaggaaccagctgaactgatcgaagctgtcaccagcgcttacggtcaggtcgatgtcctggtcagcaacgatatctttgctccagaatttcagccaatcgataaatacgctgtcgaagattacaggggtgctgtcgaagctctgcagatcaggccatttgctctagtgaatgctgtggcttcgcaaatgaagaaacgaaagtcggggcacatcatcttcatcacttcgtctactccgttcgggccatggaaagagctatcgacttacacttcggctcgagctggggcttgtgctctagctaatgctctatcgaaggagctaggagagtacaatatcccggtgttcgctatcgggccgaattacctacactcggaggattcgccgtacttctacccgactgagccgtggaagactaatccggagcacgtggctcacgtgaagaaggtgactgctctacaacgactagggactcaaaaagagttgggggaattggtggcatttttggcatctggctcttgtgattatttgactggccaggtgttttggttggcaggcggctttcctctaatagaacgttggcccggcatgcccgaataa

SEQ ID NO: 506 - protein, 254 aa, Artificial Sequence
  HHDH variant
MSTAIVTNVKHFGGMGSALRLSEAGLTVACHDESFKQKDELEAFAGTYPQLKPMSEQEPAELIEAVTSAYGQVDVLVSNDIFAPEFQPIDKYAVEDYRGAVEALQIRPFALVNAVASQMKKRKSGHIIFITSSTPFGPWKELSTYTSARAGACALANALSKELGEYNIPVFAIGPNYLHSEDSPYFYPTEPWKTNPEHVAHVKKVTALQRLGTQKELGELVAFLASGSCDYLTGQVFWLAGGFPLIERWPGMPE

SEQ ID NO: 507 - DNA, 774 bp, Artificial Sequence
  HHDH variant
  CDS (1)..(774)
atgagcaccgttatcgtcaccaacgtcaaacattttggaggtatggccagcgctctgaggctgagcgaagctggtcaaaccgtcgcttgccatgatgaaagctttaaacagaaagatgaactggaagcttttggtgaaacctacccacagctgaaaccaatgagcgaacaggaaccagctgaactgatcgaagctgtcaccagcgcttacggtcaggtcgatgtcctggtcagcaacgatatctttgctccagaatttcagccaatcgataaatacgctgtcgaagattacaggggtgctgtcgaagctctgcagatcaggccatttgctctagtgaatgctgtggcctcgcaaatgaagaagcgaaagtcggggcacatcatcttcatcacttcggctactccgttcgggccatggaaggagctatcgacttacacttcggctcgagctggggcttgtactctagctaatgctctatcgaaggagctaggagagtacaatatcccggtgttcgctatcgggccgaattacctacactcggaggattcgccgtacttctacccgactgagccgtggaagactaatccggagcacgtggctcacgtgaagaaggtgactgctctacaacgactagggactcaaaaagagttgggggaattggtggcatttttggcatctggctcttgtgattatttgactggccaggtgttttggttggcaggcggctttcccatgatagaacgttggcccggcatgcccgaataatgaggatcc

SEQ ID NO: 508 - protein, 254 aa, Artificial Sequence
  HHDH variant
MSTVIVTNVKHFGGMASALRLSEAGQTVACHDESFKQKDELEAFGETYPQLKPMSEQEPAELIEAVTSAYGQVDVLVSNDIFAPEFQPIDKYAVEDYRGAVEALQIRPFALVNAVASQMKKRKSGHIIFITSATPFGPWKELSTYTSARAGACTLANALSKELGEYNIPVFAIGPNYLHSEDSPYFYPTEPWKTNPEHVAHVKKVTALQRLGTQKELGELVAFLASGSCDYLTGQVFWLAGGFPMIERWPGMPE

SEQ ID NO: 509 - DNA, 774 bp, Artificial Sequence
  HHDH variant
  CDS (1)..(774)
atgagcaccgctattgtcaccaacgtcaaacattttggaggtatgggtagcgctctgcgtctgagcgaagctggtcataccgtcgcttgccatgatgaaagctttaagcatcaggatgaactagaagcttttgctgaaacctacccacagctgataccaatgagcgaacaggaaccagctgaactgattgaagctgtcaccagcgctcttggtcgtgtcgatgtcctggtcagcaacgatatcgcgcctgtggaatggcggccaatcgataaatacgctgtcgaggattacagggatactgtcgaagctctgcagatcaagccatttgctctagtgaatgctgtcgctccgcaaatgaagaagcgaaagtcggggcacatcatcttcatcacttcggctgcaccgttcgggccatggaaggagctctcgacttactcttcggctcgagctggggctagtgcactagctaatgctctatcgaaggagctaggagagtacaatatcccggtgttcgctatcgctccgaattacctacactcgggggattcgccgtactattacccctctgagccgtggaagacttctccggagcacgtggctcacgtgcgtaaggtgactgctctacaacgactagggactcaaaaagagttgggggaattggtgacgtttttggcatctggctcttgtgattatttgactggccaggtgttttggttggcaggcggctttcccgtcatcgaacgttggcccggcatgcccgaataatgaggatcc

SEQ ID NO: 510 - protein, 254 aa, Artificial Sequence
  HHDH variant
MSTAIVTNVKHFGGMGSALRLSEAGHTVACHDESFKHQDELEAFAETYPQLIPMSEQEPAELIEAVTSALGRVDVLVSNDIAPVEWRPIDKYAVEDYRDTVEALQIKPFALVNAVAPQMKKRKSGHIIFITSAAPFGPWKELSTYSSARAGASALANALSKELGEYNIPVFAIAPNYLHSGDSPYYYPSEPWKTSPEHVAHVRKVTALQRLGTQKELGELVTFLASGSCDYLTGQVFWLAGGFPVIERWPGMPE

SEQ ID NO: 511 - DNA, 774 bp, Artificial Sequence
  HHDH variant
  CDS (1)..(774)
atgaccaccgctatcgtcaccaacgtcaaacattttggaggtatgggtagcgctctgaggctgagcgaagctggtcataccgtcgcttgccatgatgaaagctttaaacagaaagatgaactggaagcttttgctgaaacctacccacagctgaaaccaatgagcgaacaggaaccagctgaactgatcgaagctgtcaccagcgcttacggtcaggtcgatatcctggtcagcaacgatatctttgctccagaatttcagccaatcgataaatacgctgtccaggattacaggggtgctgtcgaagctctgcagatcaggccatttgctctagtgaatgctgtggcttcgcaaatgaagaagcgaaagtcggggcacatcatcttcatcacttcggctgctccgttcgggccatggaaggagctatcgacttacacttcggctcgagctggggcttgtactctagctaatgctctatcgaaggagctaggagagtacaatatcccggtgttcgctatcgggccgaattacctacactcggaggattcgccgtacttctacccgactgagccgtggaagactaatccggagcacgtggctcacgtgaagaaggtgactgctctacaacgactagggactcaaaaagagttgggggaattggtggcatttttggcatctggctcttgtgattatttgactggccaggtgttttggttggcaggcggctttcccatgatagaacgttggcccggcatgcccgaataatgaggatcc

SEQ ID NO: 512 - protein, 254 aa, Artificial Sequence; identical to SEQ ID NO: 80
  HHDH variant

SEQ ID NO: 513 - DNA, 774 bp, Artificial Sequence
  HHDH variant
  CDS (1)..(774)
atgaccaccgctatcgtcaccaacgtcaaacattttggaggtatgggtagcgctctgaggctgagcgaagctggtcataccgtcgcttgccatgatgaaagctttaaacagaaagatgaactggaagcttttgctgaaacctacccacagctgaaaccaatgagcgaacaggaaccagctgacctgatcgaagctgtcaccagcgcttacggtcaggtcgatatcctggtcagcaacgatatctttgctccagaatttcagccaatcgataaatacgctgtccaggattacaggggtgctgtcgaagctctgcagatcaggccatttgctctagtgaatgctgtggcttcgcaaatgaagaagcgaaagtcggggcacatcatcttcatcacttcggctgctccgttcgggccatggaaggagctatcgacttacacttcggctcgagctggggcttgttccctagctaatgctctatcgaaggagctaggagagtacaatatcccggtgttcgctatcgggccgaattacctacactcggaggattcgccgtacttctacccgactgagccgtggaagactaatccggagcacgtggctcacgtgaagaaggtgactgctctacaacgactagggactcaaaaagagttgggggaattggtggcattcctggcatctggctcttgtgattatttgactggccaggtgttttggttggcaggcggctttcccatgatagaacgttggcccggcatgcccgaataatgaggatcc

SEQ ID NO: 514 - protein, 254 aa, Artificial Sequence
  HHDH variant
MTTAIVTNVKHFGGMGSALRLSEAGHTVACHDESFKQKDELEAFAETYPQLKPMSEQEPADLIEAVTSAYGQVDILVSNDIFAPEFQPIDKYAVQDYRGAVEALQIRPFALVNAVASQMKKRKSGHIIFITSAAPFGPWKELSTYTSARAGACSLANALSKELGEYNIPVFAIGPNYLHSEDSPYFYPTEPWKTNPEHVAHVKKVTALQRLGTQKELGELVAFLASGSCDYLTGQVFWLAGGFPMIERWPGMPE

SEQ ID NO: 515 - DNA, 774 bp, Artificial
  HHDH variant
  CDS (1)..(774)
atgagcaccgctatcgtcaccaacgtcaaacattttggaggtatgggtagcgctctgaggctgagcgaagctggtcataccgtcgcttgccatgatgaaagctttaaacacaaagatgatctggaagcttttgctgaaacctacccacagctgaaaccaatgagcgaacaggaaccagctgaactgatcgaagctgtcaccagcgcttacggtcaggtcgatatcctggtcagcaacgatatctttgctccagaatttcagccaatcgataaatacgctgtcgaagattacaggggtgctgtcgaagctctgcagatcaggccatttgctctagtgaatgctgtggcttcgcaaatgaagaagcgaaagtcggggcacatcatcttcatcacttcgtctactccgttcgggccatggaaagagctatcgacttacacttcggctcgagctggggcttgtactctagctaatgctctatcgaaggagctaggagagtacaatgtgccggtgttcgctatcgggccgaattacctacactcggaggattcgccgtacttctacccgactgagccgtggaagactaatccggagcacatggctcacgtgaagaaggtgactgctctacaacgactagggactcaaaaagagttgggggaattggtggcatttttggcatctggctcttgtgattatttgactggccaggtgttttggttggcaggcggctttcccctaatagaacgttggcccggcatgcccgaataatgaggatcc

SEQ ID NO: 516 - protein, 254 aa, Artificial
  HHDH variant
MSTAIVTNVKHFGGMGSALRLSEAGHTVACHDESFKHKDDLEAFAETYPQLKPMSEQEPAELIEAVTSAYGQVDILVSNDIFAPEFQPIDKYAVEDYRGAVEALQIRPFALVNAVASQMKKRKSGHIIFITSSTPFGPWKELSTYTSARAGACTLANALSKELGEYNVPVFAIGPNYLHSEDSPYFYPTEPWKTNPEHMAHVKKVTALQRLGTQKELGELVAFLASGSCDYLTGQVFWLAGGFPLIERWPGMPE

SEQ ID NO: 517 - DNA, 774 bp, Artificial Sequence
  HHDH variant
  CDS (1)..(774)
atgagcaccgctattgtcaccaacgtcaaacattttggaggtatgggtagcgccctgcgtctgagcgaagctggtcataccgtcgcttgccatgatgaaagctttaagcatcaggatgaactagaagcttttgctgaaacctacccacagctgataccaatgagcgaacaggaaccagctgaactgattgaagctgtcaccagcgctcttggtcatgtcgatatcctggtcagcaacgatatcgcgcctgtggaatggcggccaatcgataaatacgctgtcgaggattacagggatactgtcgaagctctgcagatcaagccatttgctctagtgaatgctgtcgcttcgcaaatgaagaagcgaaagtcggggcacatcatcttcatcacttcggctgccccgttcgggccatggaaggagctatcgacttactcttcggctcgagctggggctagtgcactagctaatgctctatcgaaggagctaggagagtacaatatcccggtgttcgctatcgctccgaattacctacactcgggggattcgccgtactattacccctctgagccgtggaagacttctccggagcacgtggctcacgtgcgtaaggtgactgctctacaacgactagggactcaaaaagagttgggggaattggtgacgtttttggcatctggctcttgtgattatttgactggccaggtgttttggttggcaggcggctttcccgtcatcgaacgttggcccggcatgcccgaataatgaggatcc

SEQ ID NO: 518 - protein, 254 aa, Artificial Sequence
  HHDH variant
MSTAIVTNVKHFGGMGSALRLSEAGHTVACHDESFKHQDELEAFAETYPQLIPMSEQEPAELIEAVTSALGHVDILVSNDIAPVEWRPIDKYAVEDYRDTVEALQIKPFALVNAVASQMKKRKSGHIIFITSAAPFGPWKELSTYSSARAGASALANALSKELGEYNIPVFAIAPNYLHSGDSPYYYPSEPWKTSPEHVAHVRKVTALQRLGTQKELGELVTFLASGSCDYLTGQVFWLAGGFPVIERWPGMPE

SEQ ID NO: 519 - DNA, 774 bp, Artificial Sequence
  HHDH variant
  CDS (1)..(774)
atgagcaccgctatcgtcactaacgtcaaacattttggtggtatgggtagcgctctgaggctgagcgaagctggtgataccgtcgcttgccatgatgaaagctttaaacagaaagatgaactggaagcttttgctgaaacctacccacagctgaaaccaatgagcgaacaggaaccagctgaactgatcgaagctgtcaccagcgcttacggtcaggtcgatgtcccggtcagcaacgatatctttgctccagaatttcagccaatcgataaatacgctgtcgaagattacaggggtgctgtcgaagctctgcagatcaggccatttgctctagtgaatgctgtggcttcacaaatgaagaagcgaaagtcggggcacatcatcttcatcacttcgtctactccgttcgggccgtggaaggagctatcgacttacacttcggctcgagctggggctcgtactctagctaatgctctatcgaaggagctagtagagtacaatatcccggtgttcgcaattttgtctaattacctactctctgaggattcgccgtacttctacccgactgagccgtggaagactaatccggagcacgtggctcacgtgaagaaggtgactgctctacaacgactagggactcaaaaagagttgggggaattggaggcatttttggcatctggctcttgtgattatttgactggccaggtgttttggttggcaggcggctttcccatgatagaacgttggcccggcatgcccgaataatgaggatcc

SEQ ID NO: 520 - protein, 254 aa, Artificial Sequence
  HHDH variant
MSTAIVTNVKHFGGMGSALRLSEAGDTVACHDESFKQKDELEAFAETYPQLKPMSEQEPAELIEAVTSAYGQVDVPVSNDIFAPEFQPIDKYAVEDYRGAVEALQIRPFALVNAVASQMKKRKSGHIIFITSSTPFGPWKELSTYTSARAGARTLANALSKELVEYNIPVFAILSNYLLSEDSPYFYPTEPWKTNPEHVAHVKKVTALQRLGTQKELGELEAFLASGSCDYLTGQVFWLAGGFPMIERWPGMPE

SEQ ID NO: 521 - DNA, 774 bp, Artificial Sequence
  HHDH variant
  CDS (1)..(774)
atgagcaccgctattgtcaccaacgtcaaacattttggaggtatgggtagcgctctgcgtctgagcgaagctggtcataccgtcgcttgccatgatgaaagctttaagcatcaggatgaactagaagcttttgctgaaacctacccacagctgataccaatgagcgaacaggaaccagctgaactgattgaagctgtcaccagcgctcttggtcatgtcgatgtcccggtcagcaacgatatcgcgcctgtggaatggcggccaatcgataaatacgctgtcgaggattacagggatactgtcgaagctctgcagatcaagccatttgctctagtgaatgctgtcgcttcgcaaatgaagaagcgaaagtcggggcacatcatcttcatcacttcggctgccccgttcgggccaaaaaaggagctctcgacttactcttcggctcgagctggggctagtgcactagctaatgctctatcgaaggagctaggagagtacaatatcccggtgttcgctatcgctccgaagtacctacacaccggggattcgccgtaccgctacccctctgagccgtggaagacttctccggagcacgtggctcacgtgcgtaaggtgactgctctacaacgactagggactcaaaaagagttgggggaattggtgacgtttttggcatctggctcttgtgattatttgactggccaggtgttttggttggcaggcggctttcccgtcatcgaacgttggcccggcatgcccgaataatgaggatcc

SEQ ID NO: 522 - protein, 254 aa, Artificial Sequence
  HHDH variant
MSTAIVTNVKHFGGMGSALRLSEAGHTVACHDESFKHQDELEAFAETYPQLIPMSEQEPAELIEAVTSALGHVDVPVSNDIAPVEWRPIDKYAVEDYRDTVEALQIKPFALVNAVASQMKKRKSGHIIFITSAAPFGPKKELSTYSSARAGASALANALSKELGEYNIPVFAIAPKYLHTGDSPYRYPSEPWKTSPEHVAHVRKVTALQRLGTQKELGELVTFLASGSCDYLTGQVFWLAGGFPVIERWPGMPE

SEQ ID NO: 523 - DNA, 768 bp, Artificial Sequence
  HHDH variant
  CDS (1)..(768)
atgagcaccgctattgtcaccaacgtcaaacattttggaggtatgggtagcgctctgcgtctgagcgaagctggtcataccgtcgcatgccatgatgaaagctttaagcatcaggatgaactagaagcttttgctgaaacctacccacagctgataccaatgagcgaacaggaaccagctgaactgattgaagctgtcaccagcgctcttggtcatgtcgatgtcctggtctgcaacgatatcgcgcctgtggaatggcggccaatcgataaatacgctgtcgaggattacagggatactgtcgaagctctgcagatcaagccatttgctctagtgaatgctgtcgcttcgcaaatgaagaagcgaaagtcggggcacatcatcttcatcacttcggctgccccgttcgggccatggaaggagctatcgacttactcttcggctcgagctggggctagtgcactagctaatgctctatcgaaggagctaggagagtacaatatcccggtgttcgctatcgctccgaattacctacactcgggggattcgccgtactattacccctctgagccgtggaagacttctccggagcacgtggctcacgtgcgtaaggtgactgctctacaacgactagggactcaaaaagagttgggggaattggtgacgtttttggcatctggctcttgtgattatttgactggccaggtgttttggttggcaggcggctttcccgtcatcgaacgttggcccggcatgcccgaataatga

SEQ ID NO: 524 - protein, 254 aa, Artificial Sequence
  HHDH variant
MSTAIVTNVKHFGGMGSALRLSEAGHTVACHDESFKHQDELEAFAETYPQLIPMSEQEPAELIEAVTSALGHVDVLVCNDIAPVEWRPIDKYAVEDYRDTVEALQIKPFALVNAVASQMKKRKSGHIIFITSAAPFGPWKELSTYSSARAGASALANALSKELGEYNIPVFAIAPNYLHSGDSPYYYPSEPWKTSPEHVAHVRKVTALQRLGTQKELGELVTFLASGSCDYLTGQVFWLAGGFPVIERWPGMPE

SEQ ID NO: 525 - DNA, 774 bp, Artificial Sequence
  HHDH variant
  CDS (1)..(774)
atgagcaccgctattgtcaccaacgtcaaacattttggaggtatgggtagcgctctgcgtctgagcgaagctggtcataccgtcgcttgccatgatgaaagctttaagcatcaggatgaactagaagcttttgctgaaacctacccacagctgataccaatgagcgaacaggaaccagctgaactgattgaagctgtcaccagcgctcttggtcatgtcgatgtcctggtctgcaacgatatcgcgcctgtggaatggcggccaatcgataaatacgctgtcgaggattacagggatactgtcgaagctctgcagatcaagccatttgctctagtgaatgctgtcgcttcgcaaatgaagaagcgaaagtcggggcacatcatcttcatcacttcggctgccccgttcgggccatggaaggagctatcgacttactcttcggctcgagctggggctagtgcactagctaatgctctatcgaaggagctaggagagtacaatatcccggtgttcgctatcgctccgaattacctacactcgggggattcgccgtactattacccctctgagccgtggaagacttctccggagcacgtggctcacgtgcgtaaggtgactgctctacaacgactagggactcaaaaagagttgggggaattggtgacgtttttggcatctggctcttgtgattatttgactggccaggtgttttggttggcaggcggctttcccgtcatcaaacgttggcccggcatgcccgaataatgaggatcc

SEQ ID NO: 526 - protein, 254 aa, Artificial Sequence
  HHDH variant
MSTAIVTNVKHFGGMGSALRLSEAGHTVACHDESFKHQDELEAFAETYPQLIPMSEQEPAELIEAVTSALGHVDVLVCNDIAPVEWRPIDKYAVEDYRDTVEALQIKPFALVNAVASQMKKRKSGHIIFITSAAPFGPWKELSTYSSARAGASALANALSKELGEYNIPVFAIAPNYLHSGDSPYYYPSEPWKTSPEHVAHVRKVTALQRLGTQKELGELVTFLASGSCDYLTGQVFWLAGGFPVIKRWPGMPE

SEQ ID NO: 527 - DNA, 774 bp, Artificial Sequence
  HHDH variant
  CDS (1)..(774)
atgagcaccgctatcgtcaccaacatcaaacattttggaggtatgggtagcgctctgaggctgagcgaagctggtcataccgtcgcttgccatgatgaaagctttaaacagaaagatgaactggaagcttttgctgaaacctacccacagctgaaaccaatgagcgaacaggaaccagctgaactgatcgaagctgtcaccagcgcttacggtcaggtcgaggtcctggtcagcaacgatgtctttgctccagaatttcagccaatcgataaatacgctgtcgaagattacaggggtgctgtcgaagctctgcagatcaggccatttgctctagtgaatgctgtggcttcgcaaatgaagaagcgaaagtcggggcacatcatcttcatcacttcggctactccgttcgggccatggaaggagctatcgacttacacttcggctcgagctggggcttgtactctagctaatgctctatcgaaggagctaggagagtacaatatcccggtgttcgctatcgggccgaattacctacactcggaggattcgccgtacttctacccgactgagccgtggaagactaatccggagcacgtggctcacgtgaagaaggtgactgctctacaacgactagggactcaaaaagagttgggggaattggtggcatttttggcatctggctcttgtgattatttgactggccaggtgttttggttggcaggcggctttcccatgatagaacgttggcccggcatgcccgaataatgaggatcc

SEQ ID NO: 528 - protein, 254 aa, Artificial Sequence
  HHDH variant
MSTAIVTNIKHFGGMGSALRLSEAGHTVACHDESFKQKDELEAFAETYPQLKPMSEQEPAELIEAVTSAYGQVEVLVSNDVFAPEFQPIDKYAVEDYRGAVEALQIRPFALVNAVASQMKKRKSGHIIFITSATPFGPWKELSTYTSARAGACTLANALSKELGEYNIPVFAIGPNYLHSEDSPYFYPTEPWKTNPEHVAHVKKVTALQRLGTQKELGELVAFLASGSCDYLTGQVFWLAGGFPMIERWPGMPE

SEQ ID NO: 529 - DNA, 774 bp, Artificial Sequence
  HHDH variant
  CDS (1)..(774)
atgagcaccgctatcgtcaccaacgtcaaacattttggaggtatgggtagcgctctgaggctgagcgaagctggtcataccgtcgcttgccatgatgaaagctttaaacagaaagatgaactggaagcttttgctgaaacctacccacagctgaaaccaatgagcgaacaggaaccagctgaactgatcgaagctgtcaccagcgcttttggtcaggtcgatgtcctggtcagcaacgatatctttgctccagaatttcagccaatcgataaatacgctgtcgaagattacaggggtgctgtcgaagctctgcagatcaggccatttgctctagtgaatgctgtggctccgcaaatgaagaagcgaaagtcggggcacatcatcttcatcacttcggctgccccgttcgggccatggaaggagctatcgacttacacttcggctcgagctggggctagtactctagctaatgctctatcgaaggagctaggagagtacaatatcccggtgttcgctatcgggccgaattacctacactcggaggattcgccgtacttctacccgactgagccgtggaagactaatccggagcacgtggctcacgtgaagaaggtgactgctctacaacgactagggactcaaaaagagttgggggaattggtggcatttttggcatctggctcttgtgattatttgactggccaggtgttttggttggcaggcggctttcccatgatagaacgttggcccggcatgcccgaataatgaggatcc

SEQ ID NO: 530 - protein, 254 aa, Artificial Sequence
  HHDH variant
MSTAIVTNVKHFGGMGSALRLSEAGHTVACHDESFKQKDELEAFAETYPQLKPMSEQEPAELIEAVTSAFGQVDVLVSNDIFAPEFQPIDKYAVEDYRGAVEALQIRPFALVNAVAPQMKKRKSGHIIFITSAAPFGPWKELSTYTSARAGASTLANALSKELGEYNIPVFAIGPNYLHSEDSPYFYPTEPWKTNPEHVAHVKKVTALQRLGTQKELGELVAFLASGSCDYLTGQVFWLAGGFPMIERWPGMPE

SEQ ID NO: 531 - DNA, 774 bp, Artificial Sequence
  HHDH variant
  CDS (1)..(774)
atgagcaccgctatcgtcaccaacgtcaaacattttggaggtatgggtagcgctctgaggctgagcgaagctggtcataccgtcgcttgccatgatgaaagctttaaacagaaagatgaactggaagcttttggtgaaacctacccacagctgaaaccaatgagcgaacaggaaccagctgaactgatcgaagctgtcaccagcgcttacggtcaggtcgatgtcctggtcagcaacgatatctttgctccagaatttcagccaatcgataaatacgctgtcgaagattacaggggtgctgtcgaagctctgcagatcaggccatttgctctagtgaatgctgtggcttcgcaaatgaagaagcgaaagtcggggcgtatcatcttcatcacttcggctactccgttcgggccatggaaggagctatcgacttacacttcggctcgagctggggcttgtactctagctaatgctctatcgaaggagctaggagagtacaatatcccggtgttcgctatcgggccgaattacctacactcggaggattcgccgtacttctacccgactgagccgtggaagactaatccggagcacgtggctcacgtgaagaaggtgactgctctacaacgactagggactcaaaaagagttgggggaattggtggcatttttggcatctggctcttgtgattatttgactggccaggtgttttggttggcaggcggctttcccatgatagaacgttggcccggcatgcccgaataatgaggatcc

SEQ ID NO: 532 - protein, 254 aa, Artificial Sequence
  HHDH variant
MSTAIVTNVKHFGGMGSALRLSEAGHTVACHDESFKQKDELEAFGETYPQLKPMSEQEPAELIEAVTSAYGQVDVLVSNDIFAPEFQPIDKYAVEDYRGAVEALQIRPFALVNAVASQMKKRKSGRIIFITSATPFGPWKELSTYTSARAGACTLANALSKELGEYNIPVFAIGPNYLHSEDSPYFYPTEPWKTNPEHVAHVKKVTALQRLGTQKELGELVAFLASGSCDYLTGQVFWLAGGFPMIERWPGMPE

SEQ ID NO: 533 - DNA, 774 bp, Artificial
  HHDH variant
  CDS (1)..(774)
atgagcaccgctatcgtcaccaacgtcaaacattttggaggtatgggtagcgctctgaggctgagcgaagctggtcataccgtcgcttgccatgatgaaagctttaaacagaaagatgatctggaagcttttgctgaaacctacccacagctgaaaccaatgagcgaacaggaaccagctgacctgattgaagctgtcaccagcgcttacggtcaggtcgatgtcctggtcagcaacgatatctttgctccagaatttcagccaatcgataaatacgctgtcgaaaactacaggggtgctgtcgaagctctgcagatcaggccatttgctctagtgaatgctgtggcttcgcaaatgaagaagcgaaagtcggggcacatcatcttcatcacttcggctactccgttcgggccatggaaagagctatcgacttacacttcggctcgagctggggcttgtactctagctaatgctctatcgaaggagctaggagagtacaatatcccggtgttcgctatcgggccgaattacctacactcggaggattcgccgtacttctacccgactgagccgtggaagactaatccggagcacgtggctcacgtgaagaaggtgactgctctacaacgactagggactcaaaaagagttgggggaattggtggcatttttggcatctggctcttgtgattatttgactggccaggtgttttggttggcaggcggctttcccattatcgaacgttggcccggcatgcccgaataatgaggatcc

SEQ ID NO: 534 - protein, 254 aa, Artificial; identical to SEQ ID NO: 124
  HHDH variant

SEQ ID NO: 535 - DNA, 774 bp, Artificial Sequence
  HHDH variant
  CDS (1)..(774)
atgagcaccgctatcgtcaccaacgtcaaacattttggaggtatgggtagcgctctgaggctgagcgaagctggtctgaccgtcgcttgccatgatgaaagctttaaacagaaagatgaactggaagcttttgctgaagcctacccacagctgaaaccaatgagcgaacaggaaccagctgacctgattgaagctgtcaccagcgcttacggtcaggtcgatgtcctggtcagcaacgatatcttcgctccagaatttcagccaatcgataaatacgctgtcgaagattacaggggtgctgtcgaagctctgcagatcaggccatttgctctagtgaatgctgtggcttcgcaaatgaagaaacgaaagtcggggcacatcatcttcatcacttcggctactccgttcgggccatggaaagagctatcgacttacacttcggctcgagccggggcgtgtgctctagcgaatgctctatcgaaggagctaggagagtacaatgtgccggtgttcgctatcgggccgaattacctacactcggaggattcgccgtacttctacccgactgagccgtggaagactaatccggagcacgtggctcacgtgaagaaggtgactgctctacaacgactagggactcaaaaagagttgggggaattggtggcattcctggcatctggctcttgtgattatttgactggccaggtgttttggttggcaggcggctttcccctaatagaacgttggcccggcatgcccgaataatgaggatcc

SEQ ID NO: 536 - protein, 254 aa, Artificial Sequence
  HHDH variant
MSTAIVTNVKHFGGMGSALRLSEAGLTVACHDESFKQKDELEAFAEAYPQLKPMSEQEPADLIEAVTSAYGQVDVLVSNDIFAPEFQPIDKYAVEDYRGAVEALQIRPFALVNAVASQMKKRKSGHIIFITSATPFGPWKELSTYTSARAGACALANALSKELGEYNVPVFAIGPNYLHSEDSPYFYPTEPWKTNPEHVAHVKKVTALQRLGTQKELGELVAFLASGSCDYLTGQVFWLAGGFPLIERWPGMPE

SEQ ID NO: 537 - DNA, 774 bp, Artificial Sequence
  HHDH variant
  CDS (1)..(774)
atgagcaccgctatcgtcaccaacgtcaagcattttggaggtatgggtagcgctctgaggctgagcgaagctggtcataccgtcgcttgccatgatgaaagctttaaacagaaagatgaactgggagcttttgctgaaacctacccacagctgaaaccaatgagcgaacaggaaccagctgaactgatcgaagctgtcaccagcgcttacggtcaggtcgatgtcctggtcagcaacgatatctttgctccagaactgcagccaatcgataaatacgctgtcgaagattacaggggtgctgtcgaagctctgcagatcaggccatttgctctagtgaatgctgtggcttcgcaaatgaagaagcgaaagtcggggcgtatcatcttcatcacttcggctactccgctggggccatggaaggagctatcgacttacacttcggctcgagctggggcttgtactctagctaatgctctatcgaaggagctaggagagtacaatatcccggtgttcgctatcgggccgaattacctacactcggaggattcgccgtacttctacccgactgagccgtggaagagcaatccggagcacgtggctcacgtgaagaaggtgactgctctacaacgactagggactcaaaaagagttgggggaattggtggcatttttggcatctggctcttgtgattatttgactggccaggtgttttggttggcaggcggctttcccatgatagaacgttggcccggcatgcccgaataatgaggatcc

SEQ ID NO: 538 - protein, 254 aa, Artificial Sequence
  HHDH variant
MSTAIVTNVKHFGGMGSALRLSEAGHTVACHDESFKQKDELGAFAETYPQLKPMSEQEPAELIEAVTSAYGQVDVLVSNDIFAPELQPIDKYAVEDYRGAVEALQIRPFALVNAVASQMKKRKSGRIIFITSATPLGPWKELSTYTSARAGACTLANALSKELGEYNIPVFAIGPNYLHSEDSPYFYPTEPWKSNPEHVAHVKKVTALQRLGTQKELGELVAFLASGSCDYLTGQVFWLAGGFPMIERWPGMPE

SEQ ID NO: 539 - DNA, 774 bp, Artificial Sequence
  HHDH variant
  CDS (1)..(774)
atgagcaccgctattgtcaccaacgtcaaacattttggaggtatgggtagcgctctgcgtctgagcgaagctggtcataccgtcgcttgccatgatgaaagctttaagcatcaggatgagctagaagcttttgctgaaacctacccacagctgataccaatgagcgaacaggaaccagctgaactgattgaagctgtcaccagcgctcttggtcatgtcgatgtcctggtcagcaacgatatcgcgcctgtggaatggcggccaatcgatgaatacgctgtcgaggattacagggatactgtcgaagctctgcagatcaagccatttgctctagtgaatgctgtcgcttcgcaaatgaagaagcgaaagtcggggcacatcatcttcatcacttcggctgccccgttcgggccatggaaggagctatcgacttactcttcggctcgagctggggctagtgcactagctaatgctctatcgaaggagctaggagagtacaatatcccggtgttcgctatcgctccgaattacctacactcgggggattcgccgtactattacccctctgagccgtggaagacttctccggagcacgtggctcacgtgcgtaaggtgactgctctacaacgactagggactcaaaaagagttgggggaattggtgacgtttttggcatctggctcttgtgattatttgactggccaggtgttttggttggcaggcggctttcccgtcatcgaacgttggcccggcatgcccgaataatgaggatcc

SEQ ID NO: 540 - protein, 254 aa, Artificial Sequence
  HHDH variant
MSTAIVTNVKHFGGMGSALRLSEAGHTVACHDESFKHQDELEAFAETYPQLIPMSEQEPAELIEAVTSALGHVDVLVSNDIAPVEWRPIDEYAVEDYRDTVEALQIKPFALVNAVASQMKKRKSGHIIFITSAAPFGPWKELSTYSSARAGASALANALSKELGEYNIPVFAIAPNYLHSGDSPYYYPSEPWKTSPEHVAHVRKVTALQRLGTQKELGELVTFLASGSCDYLTGQVFWLAGGFPVIERWPGMPE

SEQ ID NO: 541 - DNA, 774 bp, Artificial Sequence
  HHDH variant
  CDS (1)..(774)
atgagcaccgctattgtcaccaacgtcaaacattttggaggtatgggtagcgctctgcgtctgagcgaagctggtcataccgtcgcttgccatgatgaaagctttaagcatcaggatgaactagaagcttttgctgaaacctacccacagctgataccaatgagcgaacaggaaccagctgaactgattgaagctgtcaccagcgctcttggtcatgtcgatgtcctggtcagcaacgatatcgcgcctgtggaatggcggccaatcgataaatacgatgtcgaggattacaggggtactgtcgaagctctgcagatcaagccatttgctctagtgaatgctgtcgcttcgcaaatgaagaagcgaaagtcggggcacatcatcttcatcacttcggctgccccgttcgggccatggaaggagctatcgacttactcttcggctcgagctggggctagtgcactagctaatgctctatcgaaggagctaggagagtacaatatcccggtgttcgctatcgctccgaattacctacactcgggggattcgccgtactattacccctctgagccgtggaagacttctccggagcacgtggctcacgtgcgtaaggtgactgctctacaacgactagggactcaaaaagagttgggggaattggtgacgtttttggcatctggctcttgtgattatttgactggccaggtgttttggttggcaggcggctttcccgtcatcgaacgttggcccggcatgcccgaataatgaggatcc

SEQ ID NO: 542 - protein, 254 aa, Artificial Sequence
  HHDH variant
MSTAIVTNVKHFGGMGSALRLSEAGHTVACHDESFKHQDELEAFAETYPQLIPMSEQEPAELIEAVTSALGHVDVLVSNDIAPVEWRPIDKYDVEDYRGTVEALQIKPFALVNAVASQMKKRKSGHIIFITSAAPFGPWKELSTYSSARAGASALANALSKELGEYNIPVFAIAPNYLHSGDSPYYYPSEPWKTSPEHVAHVRKVTALQRLGTQKELGELVTFLASGSCDYLTGQVFWLAGGFPVIERWPGMPE

SEQ ID NO: 543 - DNA, 768 bp, Artificial Sequence
  HHDH variant
  CDS (1)..(768)
atgagcaccgctattgtcaccaacgtcaaacattttggaggtatgggtagcgctctgaggctgagcgaagctggtcataccgtcgcttgccatgatgaaagctttaagcataaagatgaactggaagcttttgctgaaacctacccacagctgaaaccaatgagcgaacaggaaccagctgaactgattgaagctgtcaccagcgcttttggtcaggtcgatgtcctggtcagcaacgatatctttgctctagaatttcggccaatcgataaatacgctgtcggggattacaggggtgctgtcgaagctctgcagatcaggccatttgctctagtgaatgctgtggcttcgcaaatgaagaagcgaaagtcggggcacatcatcttcatcacttcggctgccccgttcgggccatggaaggagctatcgacttactcttcggctcgagctggggctagtgcactagctaatgctctatcgaaggagctaggagagtacaatatcccggtgttcgctatcgggccgaattacctacactcggaggattcgccgtactattaccccactgagccgtggaagattaatccggagcacgtggctcacgtgaagaaggtgactgctctacaacgactagggactcaaaaagagttgggggaattggtggcatttttggcatctggctcttgtgattatttgactggccaggtgttttggttggcaggcggctttcccgtcatagaacgttggcccggcatgcccgaataatga

SEQ ID NO: 544 - protein, 254 aa, Artificial Sequence
  HHDH variant
MSTAIVTNVKHFGGMGSALRLSEAGHTVACHDESFKHKDELEAFAETYPQLKPMSEQEPAELIEAVTSAFGQVDVLVSNDIFALEFRPIDKYAVGDYRGAVEALQIRPFALVNAVASQMKKRKSGHIIFITSAAPFGPWKELSTYSSARAGASALANALSKELGEYNIPVFAIGPNYLHSEDSPYYYPTEPWKINPEHVAHVKKVTALQRLGTQKELGELVAFLASGSCDYLTGQVFWLAGGFPVIERWPGMPE

SEQ ID NO: 545 - DNA, 768 bp, Artificial Sequence
  HHDH variant
  CDS (1)..(768)
atgagcaccgctattgtcaccaacgtcaaacattttggaggtatgggtagcgctctgcgtctgagcgaagctggtcataccgtcgcttgccatgatgaaagctttaagcatcaggatgaactagaagcttttgctgaaacctacccacagctgataccaatgagcgaacaggaaccagctgaactgattgaagctgtcaccagcgctcttggtcatgtcgatgtcctggtcagcaacgatatcgcgcctgtggaatggcggccaatcgataaatacgctgtcggggattacagggatactgtcgaagctctgcagatcaagccatttgctctagtgaatgctgtcgcttcgcaaatgaagaagcgaaagtcggggcacatcatcttcatcacttcggctgccccgttcgggccatggaaggagctatcgacttactcttcggctcgagctggggctagtgcactagctaatgctctatcgaaggagctaggagagtacaatatcccggtgttcgctatcgctccgaattacctacactcgggggattcgccgtactattacccctctgagccgtggaagacttctccggagcacgtggctaaggtccgtaaggtgactgctctacaacgactagggactcaaaaagagttgggggaattggtgacgtttttggcatctggctcttgtgattatttgactggccaggtgttttggttggcaggcggctttcccgtcatcgatcgttggcccggcatgcccgaataatga

SEQ ID NO: 546 - protein, 254 aa, Artificial Sequence
  HHDH variant
MSTAIVTNVKHFGGMGSALRLSEAGHTVACHDESFKHQDELEAFAETYPQLIPMSEQEPAELIEAVTSALGHVDVLVSNDIAPVEWRPIDKYAVGDYRDTVEALQIKPFALVNAVASQMKKRKSGHIIFITSAAPFGPWKELSTYSSARAGASALANALSKELGEYNIPVFAIAPNYLHSGDSPYYYPSEPWKTSPEHVAKVRKVTALQRLGTQKELGELVTFLASGSCDYLTGQVFWLAGGFPVIDRWPGMPE

SEQ ID NO: 547 - DNA, 768 bp, Artificial Sequence
  HHDH variant
  CDS (1)..(768)
atgagcaccgctattgtcaccaacgtcaaacattttggaggtatgggtagcgctctgcgtctgagcgaagctggtcataccgtcgcttgccatgatgaaagctttaagcatcaggatgaactggaagcttttgctgaaacctacccacagctgataccaatgagcgaacaggaaccagctgaactgattgaagctatcaccagcgctcttggtcaggtcgatgtcctggtcagcaacgatatcgctgctgtggaatggcggccaatcgataaatacgctgtcggggattacaggggtactgtcgaagctctgcagatcaggccatttgctctagtgaatgctgtcgcttcgcaaatgaagaagcgaaagtcggggcacatcatcttcatcacttcggctgccccgttcgggccatggaaggagctatcgacttactcttcggctcgagctggggctagtgcactagctaatgctctatcgaaggagctaggagagtacaatatcccggtgttcgctatcgctccgaattacctacactcggaggattcgccgtactattacccctctgagccgtggaagacttctccggagcacgtggctcacgtgcgtaaggtgactgctctacaacgactagggactcaaaaagagttgggggaattggtgacatttttggcatctggctcttgtgattatttgactggccaggtgttttggttggcaggcggctttcccgtcatcgaacgttggcccggcatgcccgaataatga

SEQ ID NO: 548 - protein, 254 aa, Artificial Sequence
  HHDH variant
MSTAIVTNVKHFGGMGSALRLSEAGHTVACHDESFKHQDELEAFAETYPQLIPMSEQEPAELIEAITSALGQVDVLVSNDIAAVEWRPIDKYAVGDYRGTVEALQIRPFALVNAVASQMKKRKSGHIIFITSAAPFGPWKELSTYSSARAGASALANALSKELGEYNIPVFAIAPNYLHSEDSPYYYPSEPWKTSPEHVAHVRKVTALQRLGTQKELGELVTFLASGSCDYLTGQVFWLAGGFPVIERWPGMPE

SEQ ID NO: 549 - DNA, 768 bp, Artificial Sequence
  HHDH variant
  CDS (1)..(768)
atgagcaccgctattgtcaccaacgtcagacattttggaggtatgggtagcgctctgcgtctgagcgaagctggtcataccgtcgcttgccatgatgaaagctttaagcatcaggatgaactagaagcttttgctgaaacctacccacagctgataccaatgagcgaacaggaaccagctgaactgattgaagctgtcaccagcgctcttggtcatgtcgatgtcctggtcagcaacgatatcgcgcctgtggaatggcggccaatcgataaatacgctgtcggggattacagggatactgtcgaagctctgcagatcaagccatttgctctagtgaatgctgtcgcttcgcaaatgaagaagcgaaagtcggggcacatcatcttcatcacttcggctgccccgttcgggccatggaaggagctatcgacttactcttcggctcgagctggggctagtgcactagctaatgctctatcgaaggagctaggagagtacaatatcccggtgttcgctatcgctccgaattacctacactcgggggattcgccgtactattacccctctgagccgtggaagacttctccggagcacgtggctcacgtgcgtaaggtgactgctctacaacgactagggactcaaaaagagttgggggaattggtgacgtttttggcatctggctcttgtgattatttgactggccaggtgttttggttggcaggcggctttcccgtcatcgagcgttggcccggcatgcccgaataatga

SEQ ID NO: 550 - protein, 254 aa, Artificial Sequence
  HHDH variant
MSTAIVTNVRHFGGMGSALRLSEAGHTVACHDESFKHQDELEAFAETYPQLIPMSEQEPAELIEAVTSALGHVDVLVSNDIAPVEWRPIDKYAVGDYRDTVEALQIKPFALVNAVASQMKKRKSGHIIFITSAAPFGPWKELSTYSSARAGASALANALSKELGEYNIPVFAIAPNYLHSGDSPYYYPSEPWKTSPEHVAHVRKVTALQRLGTQKELGELVTFLASGSCDYLTGQVFWLAGGFPVIERWPGMPE

SEQ ID NO: 551 - DNA, 774 bp, Artificial Sequence
  HHDH variant
  CDS (1)..(774)
atgagcaccgctatcgtcaccaacgtcaaacattttggaggtatgggtagcgctctgaggctgagcgaaggtggtcataccgtcgcttgccatgatgaaagctttaaacagaaagatgaactggaagcttttgctgaaacctacccacagctgaaaccaatgagcgaacaggaaccagctgaactgatcgaagctgtcaccagcgcttttggtcaggtcgatgtcctggtcagcaacgatatctttgctccagaatttcagccaatcgataaatatgctgtcgaagattacaggggtgctgtcgaagctctgcagatcaggccatttgctctagtgaatgctgtggcttcgcaaatgaagaagcgaaagtcggggcacatcatcttcatcacttcggctgccagtcaggggccatggaaggagctatcgacttacacttcggctcgagctggggctagtactctagctaatgctctatcgaaggagctaggagagtacaatatcccggtgttcgctatcgggccgaattacctacactcggaggattcgccgtacttctacccgactgagccgtggaagactaatccggagcacgtggctcacgtgaagaaggtgactgctctacaacgactagggactcaaaaagagttgggggaattggtggcatttttggcatctggctcttgtgattatttgactggccaggtgttttggttggcaggcggctttcccatgatagaacgttggcccggcatgcccgaataatgaggatcc

SEQ ID NO: 552 - protein, 254 aa, Artificial Sequence
  HHDH variant
MSTAIVTNVKHFGGMGSALRLSEGGHTVACHDESFKQKDELEAFAETYPQLKPMSEQEPAELIEAVTSAFGQVDVLVSNDIFAPEFQPIDKYAVEDYRGAVEALQIRPFALVNAVASQMKKRKSGHIIFITSAASQGPWKELSTYTSARAGASTLANALSKELGEYNIPVFAIGPNYLHSEDSPYFYPTEPWKTNPEHVAHVKKVTALQRLGTQKELGELVAFLASGSCDYLTGQVFWLAGGFPMIERWPGMPE

SEQ ID NO: 553 - DNA, 774 bp, Artificial Sequence
  HHDH variant
  CDS (1)..(774)
atgagcaccgctatcgtcaccaacgtcaaacattttggaggtatgggtagcgctctgaggctgagcgaaggtggtcataccgtcgcttgccatgatgaaagctttaaacagaaagatgaactggaagcttttgctgaaacctacccacagctgaaaccaatgagcgaacaggaaccagctgaactgatcgaagctgtcaccagcgcttttggtcaggtcgatgtcctggtcagcaacgatatctttgctccagaatttcagccaatcgataaatatgctgtcgaagattacaggggtgctgtcgaagctctgcagatcaggccatttgctctagtgaatgctgtggcttcgcaaatgaagaagcgaaagtcggggcacatcatcttcatcacttcggctgcccagcgggggccatggaaggagctatcgacttacacttcggctcgagctggggctagtactctagctaatgctctatcgaaggagctaggagagtacaatatcccggtgttcgctatcgggccgaattacctacactcggaggattcgccgtacttctacccgactgagccgtggaagactaatccggagcacgtggctcacgtgaagaaggtgactgctctacaacgactagggactcaaaaagagttgggggaattggtggcatttttggcatctggctcttgtgattatttgactggccaggtgttttggttggcaggcggctttcccatgatagaacgttggcccggcatgcccgaataatgaggatcc

SEQ ID NO: 554 - protein, 254 aa, Artificial Sequence
  HHDH variant
MSTAIVTNVKHFGGMGSALRLSEGGHTVACHDESFKQKDELEAFAETYPQLKPMSEQEPAELIEAVTSAFGQVDVLVSNDIFAPEFQPIDKYAVEDYRGAVEALQIRPFALVNAVASQMKKRKSGHIIFITSAAQRGPWKELSTYTSARAGASTLANALSKELGEYNIPVFAIGPNYLHSEDSPYFYPTEPWKTNPEHVAHVKKVTALQRLGTQKELGELVAFLASGSCDYLTGQVFWLAGGFPMIERWPGMPE

SEQ ID NO: 555 - DNA, 774 bp, Artificial Sequence
  HHDH variant
  CDS (1)..(774)
atgagcaccgctatcgtcactaacgtcaaacattttggtggtatgggtagcgctctgaggctgagcgaagctggtcataccgtcgcttgccatgatgaaagctttaaacagaaagatgaactggaagcttttgctgaaacctacccacagctgaaaccaatgagcgaacaggaaccagctgaactgatcgaagctgtcaccagcgcttacggtcaggtcgatgtcctggtcagcaacgatatctttgctccagaatttcagccaatcgataaatacgctgtcgaagattacaggggtgctgtcgaagctctgcagatcaggccatttgctctagtgaatgctgtggcttcgcaaatgaagaagcgaaagtcggggcacatcatcttcatcacttcggctactccgttcgggccgtggaaggagctatcgacttacacttcggctcgagctggggcttgtactctagctaatgctctatcgaaggagctaggagagtacaatatcccggtgttcgctatcgggccgaattacctacactcggaggattcgccgtacttctacccgactgagccgtggaagactaatccggagcacgtggctcacgtgaagaaggtgactgctctacaacgactagggactcaaaaagagttgggggaattggtggcatttttggcatctggctcttgtgattatttgactggccaggtgttttggttggcaggcggctttcccatgatagaacgttggcccggcatgcccgaataatgaggatcc

SEQ ID NO: 556 - protein, 254 aa, Artificial Sequence; identical to SEQ ID NO: 2
  HHDH variant

SEQ ID NO: 557 - DNA, 768 bp, Artificial Sequence
  HHDH variant
  CDS (1)..(768)
atgagcaccgctattgtcaccaacgtcaaacattttggaggtatgggtagcgctctgcgtctgagcgaagctggtcataccgtcgcttgccatgatgaaagctttaagcatcaggatgaactggaagcttttgctgaaacctacccacagctgataccaatgagcgaacaggatccagctgaactgattgaagctgtcaccagcgctcttggtcaggtcgatgtcctggtcagcaacgatatcgctgctgtggaatggcggccaatcgataaatacgctgtcgaggattacaggggtactgtcgaagctctgcagatcaagccatttgctctagtgaatgctgtcgcttcgcaaatgaagaagcgaaagtcggggcacatcatcttcatcacttcggctgccccgttcgggccatggaaggagctatcgacttactcttcggctcgagctggggctagtgcactagctaatgctctatcgaaggagctaggagagtacaatatcccggtgttcgctatcgctccgaattacctacactcggaggattcgccgtactattacccctctgagccgtggaagacttctccggagcacgtggctcacgtgcgtaaggtgactgctctacaacgactagggactcaaaaagagttgggggaattggtgacatttttggcatctggctcttgtgattatttgactggccaggtgttttggttggcaggcggctttcccgtcatcgaacgttggcccggcatgcccgaataatga

SEQ ID NO: 558 - protein, 254 aa, Artificial Sequence
  HHDH variant
MSTAIVTNVKHFGGMGSALRLSEAGHTVACHDESFKHQDELEAFAETYPQLIPMSEQDPAELIEAVTSALGQVDVLVSNDIAAVEWRPIDKYAVEDYRGTVEALQIKPFALVNAVASQMKKRKSGHIIFITSAAPFGPWKELSTYSSARAGASALANALSKELGEYNIPVFAIAPNYLHSEDSPYYYPSEPWKTSPEHVAHVRKVTALQRLGTQKELGELVTFLASGSCDYLTGQVFWLAGGFPVIERWPGMPE

SEQ ID NO: 559 - DNA, 768 bp, Artificial Sequence
  HHDH variant
  CDS (1)..(768)
atgagcaccgctattgtcacgaacgtcaaacattttggaggtatgggtagcgctctgaggctgagcgaagctggtcataccgtcgcttgccatgatgaaagctttaagcataaagatgaactggaagcttttgctgaaacctacccacagctgataccaatgagcgaacaggaaccagctgaactgattgaagctgtcaccagcgctttcggtcaggtcgatgtcctggtcagcaacgatatctatgctctacaatttcgtccaatcgataaatacgctgtcgaggattacaggggtgctgtcgaagctctgcaggtcaggccatttgctctagtgaatgctgtggcttcgcaaatgaagaagcgaaagtcggggcacatcatcttcatcacttcggctgccccgttcgggccatggaaggagctatcgacttactcttcggctcgagctgggactagtgcactagctaatgctctatcgaaggagctaggagagtacaatatcccggtgttcgctatcgggccgaattacctacactcggaggattcgccgtactattaccccactgagccgtggaagattaatccggagcacgtggctcacgtgaagaaggtgactgctctacaacgactagggactcaaaaagagttgggggaattggtgacatttttggcatctggctcttgtgattatttgactggccaggtgttttggttggcaggcggctttcccgtcatcgaacgttggcccggcatgcccgaataatga

SEQ ID NO: 560 - protein, 254 aa, Artificial Sequence
  HHDH variant
MSTAIVTNVKHFGGMGSALRLSEAGHTVACHDESFKHKDELEAFAETYPQLIPMSEQEPAELIEAVTSAFGQVDVLVSNDIYALQFRPIDKYAVEDYRGAVEALQVRPFALVNAVASQMKKRKSGHIIFITSAAPFGPWKELSTYSSARAGTSALANALSKELGEYNIPVFAIGPNYLHSEDSPYYYPTEPWKINPEHVAHVKKVTALQRLGTQKELGELVTFLASGSCDYLTGQVFWLAGGFPVIERWPGMPE

SEQ ID NO: 561 - DNA, 768 bp, Artificial Sequence
  HHDH variant
  CDS (1)..(768)
atgagcaccgctgtcgtcaccaacgtcaaacattttggaggtatgggtagcgctctgaggctgagcgaagctggtcataccgtcgcttgccatgatgaaagctttaaacagaaagatgaactggaagcttttgctgaaacctacccacagctgaaaccaatgagcgaacaggaaccagctgaactgatcgaagctgtcaccagcgcttttggtcaggtcgatgtcctggtcagcaacgatatctttgctctagaatttcggccaatcgataaatacgctgtcgaagattacaggggtgctgtcgaagctctgcagatcaggccatttgctctagtgaatgctgtggcttcccaaatgaagaagcgaaagtcggggcacatcatcttcatcacttcggctgccccgttcgggccatggaaggagctatcgacttactcttcggctcgagctggggctagtgcactagctaatgctctatcgaaggagctaggagagtacaatatcccggtgttcgctatcgggccgaattacctacactcggaggattcgccgtactattaccccactgagccgtggaagattgatccggagcacgtggctcacgtgaagaaggtgactgctctacaacgactagggactcaaaaagagttgggggaattggtggcatttttggcatctggctcttgtgattatttgactggccaggtgttttggttggcaggcggctttcccacgatagaacgttggcccggcatgcccgaataatga

SEQ ID NO: 562 - protein, 254 aa, Artificial Sequence
  HHDH variant
MSTAVVTNVKHFGGMGSALRLSEAGHTVACHDESFKQKDELEAFAETYPQLKPMSEQEPAELIEAVTSAFGQVDVLVSNDIFALEFRPIDKYAVEDYRGAVEALQIRPFALVNAVASQMKKRKSGHIIFITSAAPFGPWKELSTYSSARAGASALANALSKELGEYNIPVFAIGPNYLHSEDSPYYYPTEPWKIDPEHVAHVKKVTALQRLGTQKELGELVAFLASGSCDYLTGQVFWLAGGFPTIERWPGMPE

SEQ ID NO: 563 - DNA, 768 bp, Artificial Sequence
  HHDH variant
  CDS (1)..(768)
atgaacaccgctattgtcaccaacgtcaaacattttggaggtatgggtagcgctctgaggctgagcgaagctggtcataccgtcgcttgccatgatgaaagctttaagcataaagatgaactggaagcttttgctgaagcctacccacagctgataccaatgagcgaacaggaaccagctgaactgattgaagctgtcaccagcgcttttggtcatgtcgatgtcctggtcagcaacgatatctttgccctagaatttcggccaatcgataaatacgctgtcgaggattacaggggtgctgtcgaagctctgcagatcaggccatttgctctagtgaatgctgtggcttcgcaaatgaagaagcgaaagtcggggcacatcatcttcatcacctcggctgccccgttcgggccatggaaggagctatcgacttactcttcggctcgagctgggactagtgcactagctaatgctctatcgaaggagctaggagagtacaatatcccggtgttcgctatcgggccgaattacctacactcggaggattcgccgtactattacccctctgatccgtggaagactaatccggagcacgtggctcacgtgaagaaggtgactgctctacaacgactagggactcaaaaagagttgggggaattggtgacatttttggcatctggctcttgtgattatttgactggccaggtgttttggttggcaggcggctttcccgtcatagaacgttggcccggcatgcccgaataatga

SEQ ID NO: 564 - protein, 254 aa, Artificial Sequence
  HHDH variant
MNTAIVTNVKHFGGMGSALRLSEAGHTVACHDESFKHKDELEAFAEAYPQLIPMSEQEPAELIEAVTSAFGHVDVLVSNDIFALEFRPIDKYAVEDYRGAVEALQIRPFALVNAVASQMKKRKSGHIIFITSAAPFGPWKELSTYSSARAGTSALANALSKELGEYNIPVFAIGPNYLHSEDSPYYYPSDPWKTNPEHVAHVKKVTALQRLGTQKELGELVTFLASGSCDYLTGQVFWLAGGFPVIERWPGMPE

SEQ ID NO: 565 - DNA, 774 bp, Artificial Sequence
  HHDH variant
  CDS (1)..(774)
atgaccaccgctatcgtcaccaacgtcaaacattttggaggtatgggtagcgctctgaggctgagcgaagctggtcataccgtcgcttgccatgatgaaagctttaaacagaaagatgaactggaagcttttgctgaaacctacccacagctgaaaccaatgagcgaacaggaaccagctgaactgatcgaagctgtcaccagcgcttacggtcaggtcgatgtcctggtcagcaacgatatttttgctccagaatttcgtccaatcgataaatacgctgtcgaagattacaggggtgctgtcgaagctctgcagatcaggccatttgctctagtgaatgctgtggcttcgcaaatgaagaagcgaaagtcggggcgtatcatcttcatcacttcggctactctgctggggccatggaaggagctatcgacttacacttcggctcgagctggggcttgtactctagctaatgctctatcgaaggagctaggagagtacaatatcccggtgttcgctatcgggccgaattacctacactcggaggattcgccgtacttctacccgactgagccgtggaagactaatccggagcacgtggctcacgtgaagaaggtgactgctctacaacgactagggactcaaaaagagttgggggaattggtggcatttttggcatctggctcttgtgattatttgactggccaggtgttttggttggcaggcggctttcccatgatagaacgttggcccggcatgcccgaataatgaggatcc

SEQ ID NO: 566 - protein, 254 aa, Artificial Sequence
  HHDH variant
MTTAIVTNVKHFGGMGSALRLSEAGHTVACHDESFKQKDELEAFAETYPQLKPMSEQEPAELIEAVTSAYGQVDVLVSNDIFAPEFRPIDKYAVEDYRGAVEALQIRPFALVNAVASQMKKRKSGRIIFITSATLLGPWKELSTYTSARAGACTLANALSKELGEYNIPVFAIGPNYLHSEDSPYFYPTEPWKTNPEHVAHVKKVTALQRLGTQKELGELVAFLASGSCDYLTGQVFWLAGGFPMIERWPGMPE

SEQ ID NO: 567 - DNA, 774 bp, Artificial Sequence
  HHDH variant
  CDS (1)..(774)
atgagcaccgctatcgtcaccaacgtcaaacattttggaggtatgggtagcgctctgaggctgagcgaagctggtcataccgtcgcttgccatgatgaaagctttaaacagaaagatgaactggaagcttttgctgaaacctacccacagctgaaaccaatgagcgaacaggaaccagctgaactgatcgaagctgtcaccagcgcttacggtcaggtcgatgtcatggtcagcaacgatatctttgctccagaatttcagccaatcgataaatacgctgtcgaagattacaggggtgctgtcgaagctctgcagatcaggccatttgctctagtgaatgctgtggctgcgcaaatgaagaaacgaaagtcggggcacatcatcttcatcacttcggctactccgttcgggccatggaaggagctatcgacttacacttcggctcgagccggggcgtgtgctctagcgaatgctctatcgaaggagctaggagagtacaatatcccggtgttcgctatcgggccgaattacctacactcggaggattcgccgtacttctacccgactgagccgtggaagactaatccggagcacgtggctcacgtgaagaaggtgactggtctacaacgactagggactcaaaaagagttgggggaattggtggcatttttggcatctggctcttgtgattatttgactggccaggtgttttggttggcaggcggctttcccatgatagaacgctggcccgttatgcccgaataatgaggatcc

SEQ ID NO: 568 - protein, 254 aa, Artificial Sequence
  HHDH variant
MSTAIVTNVKHFGGMGSALRLSEAGHTVACHDESFKQKDELEAFAETYPQLKPMSEQEPAELIEAVTSAYGQVDVMVSNDIFAPEFQPIDKYAVEDYRGAVEALQIRPFALVNAVAAQMKKRKSGHIIFITSATPFGPWKELSTYTSARAGACALANALSKELGEYNIPVFAIGPNYLHSEDSPYFYPTEPWKTNPEHVAHVKKVTGLQRLGTQKELGELVAFLASGSCDYLTGQVFWLAGGFPMIERWPVMPE

SEQ ID NO: 569 - DNA, 774 bp, Artificial Sequence
  HHDH variant
  CDS (1)..(774)
atgagcaccgctatcgtcaccaacgtcaaacattttggaggtatgggtagcgctctgaggctgagcgaagctggtcataccgtcgcttgccatgatgaaagctttaaacagaaagatgaactggaagcttttgctgaaacctacccacagctgaaaccaatgagcgaacaggaaccagctgaactgatcgaagctgtcaccagcgcttacggtcaggtcgatgtcctggtcagcaacgatatctttgctccagaatttcagccaatcgataaatacgctgtccaggattaccgtggtgctgatgaagctctgcagatcaggccatttgctctagtgaatgctgtggcttcgcaaatgaagaagcgaaagtcggggcacatcatcttcatcacttcggctactccgttcgggccatggaaggagctatcgacttgcacttcggctcgagctggggcttgtactctagctaatgctctatcgaaggagctaggagagtacaatatcccggtgttcgctatcgggccgaattacctacactcggaggattcgccgtacttctacccgagcgagccgtggaagactaatccggagcacgtggctcacgtgaagaaggtgactgctctacaacgactagggactcaaaaagagttgggggaattggtggcatttttggcatctggctcttgtgattatctgactggccaggtgtgctggctggcaggcggctttccgatgatagaacgttggcccggcatgcccgaataatgaggatcc

SEQ ID NO: 570 - protein, 254 aa, Artificial Sequence
  HHDH variant
MSTAIVTNVKHFGGMGSALRLSEAGHTVACHDESFKQKDELEAFAETYPQLKPMSEQEPAELIEAVTSAYGQVDVLVSNDIFAPEFQPIDKYAVQDYRGADEALQIRPFALVNAVASQMKKRKSGHIIFITSATPFGPWKELSTCTSARAGACTLANALSKELGEYNIPVFAIGPNYLHSEDSPYFYPSEPWKTNPEHVAHVKKVTALQRLGTQKELGELVAFLASGSCDYLTGQVCWLAGGFPMIERWPGMPE

SEQ ID NO: 571 - DNA, 774 bp, Artificial Sequence
  HHDH variant
  CDS (1)..(774)
atgagcaccgctatcgtcaccaacgtcaaacattttggaggtatgggtagcgctctgaggctgagcgaagctggtcataccgtcgcttgccatgatgaaagctttaaacagaaagatgaactggaagcttttgctgaaacctacccacagctgaaaccaatgagcgaacaggaaccagctgaactgatcgaagctgtcaccagcgcttttggtcaggtcgatgtcctggtcagcaacgatatctttgctccagaatttcagccaatcgataaatacgctgtcgaagattacaggggtgctgtcgaagctctgcagatcaggccatttgctctagtgaatgctgtggcttcgcaaatgaagaagcgaaagtcggggcacatcatcttcatcacttcggctgccccgttcgggccatggaaggagctatcgacttacacttcggctcgagctggggctagtactctagctaatgctctatcgaaggagctaggagagtacaatatcccggtgttcgctatcgggccgaattacctacactcggaggattcgccgtacttctacccgactgagccgtggaagactaatccggagcacgtggctcacgtgaagaaggtgactgctctacaacgactagggactcaaaaagagttgggggaattggtggcatttttggcatctggctcttgtgattatttgactggccaggtgttttggttggcaggcggctttcccatgatagaacgttggcccggcatgcccgaataatgaggatcc

SEQ ID NO: 572 - protein, 254 aa, Artificial Sequence
  HHDH variant
MSTAIVTNVKHFGGMGSALRLSEAGHTVACHDESFKQKDELEAFAETYPQLKPMSEQEPAELIEAVTSAFGQVDVLVSNDIFAPEFQPIDKYAVEDYRGAVEALQIRPFALVNAVASQMKKRKSGHIIFITSAAPFGPWKELSTYTSARAGASTLANALSKELGEYNIPVFAIGPNYLHSEDSPYFYPTEPWKTNPEHVAHVKKVTALQRLGTQKELGELVAFLASGSCDYLTGQVFWLAGGFPMIERWPGMPE

SEQ ID NO: 573 - DNA, 774 bp, Artificial Sequence
  HHDH variant
  CDS (1)..(774)
atgagcaccgctatcgtcaccaacgtcaaacattttggaggtatgggtagcgctctgaggctgagcgaagctggtcataccgtcgcttgccatgatgaaagctttaaacagaaagatgaactggaagcttttgctgaaacctacccacagctgaaaccaatgggcgaacaggaaccagctgaactgatcgaagctgtcaccagcgcttacggtcaggtcgatgtcctggtcagcaacgatatctttgctccagaactgcagccaatcgataaatacgctgtcgaagattacaggggtgctgtcgaagctctgcagatcaggccatttgctgttgtgaatgctgtggcttcgcaaatgaagaagcgaaagtcggggcacatcatcttcatcacttcggctactccgctggggccatggaaggagctatcgacttacacttcggctcgagctggggcttgtactctagctaatgctctatcgaaggagctaggagagtacaatatcccggtgttcgctatcgggccgaattacctacactcggaggattcgccgtacttctacccgactgagccgtggaagactaatccggagcacgtggctcacgtgaagaaggtgactggtctacaacgactagggactcaaaaagagttgggggaattggtggcatttttggcatctggctcttgtgattatttgactggccaggtgttttggttggcaggcggctttcccatgatagaacgttggcccggcatgcccgaataatgaggatcc

SEQ ID NO: 574 - protein, 254 aa, Artificial Sequence
  HHDH variant
MSTAIVTNVKHFGGMGSALRLSEAGHTVACHDESFKQKDELEAFAETYPQLKPMGEQEPAELIEAVTSAYGQVDVLVSNDIFAPELQPIDKYAVEDYRGAVEALQIRPFAVVNAVASQMKKRKSGHIIFITSATPLGPWKELSTYTSARAGACTLANALSKELGEYNIPVFAIGPNYLHSEDSPYFYPTEPWKTNPEHVAHVKKVTGLQRLGTQKELGELVAFLASGSCDYLTGQVFWLAGGFPMIERWPGMPE

SEQ ID NO: 575 - DNA, 774 bp, Artificial Sequence
  HHDH variant
  CDS (1)..(774)
atgagcaccgctatcgtcaccaacgtcaaacattttggaggtatgggtagcgctctgaggctgagcgaagctggtcataccgtcgcttgccatgatgaaagctttaaacagaaagatgatctggaagcttttgctgaaacctacccacagctgaaaccaatgagcgaacaggaaccagctgaactgattgaagctgtcaccagcgcttacggtcaggtcgatgtcctggtcagcaacgatatctttgctccagaatctcagccaatcgataaatacgctgtcgaagattacaggggtgctgtcgaagctctgcagatcaggccatttgctctagtgaatgctgtggcttcgcaaatgaagaaacgaaagtcggggcacatcatcttcatcacttcgtctactccgttcgggccatggaaagagctatcgacttacacttcggctcgagctggggcttgtactctagctaatgctctatcgaaggagctaggagagtacaatatcccggtgttcgctatcgggccgaattacctacactcggaggattcgccgtacttctacccgactgagccgtggaagactaatccggagcacgtggctcacgtgaagaaggtgactgctctacaacgactagggactcaaaaagagttgggggaattggtggcattcctggcatctggctcttgtgattatttgactggccaggtgttttggttggcaggcggctttcccctaatagaacgttggcccggcatgcccgaataatgaggatcc

SEQ ID NO: 576 - protein, 254 aa, Artificial Sequence
  HHDH variant
MSTAIVTNVKHFGGMGSALRLSEAGHTVACHDESFKQKDDLEAFAETYPQLKPMSEQEPAELIEAVTSAYGQVDVLVSNDIFAPESQPIDKYAVEDYRGAVEALQIRPFALVNAVASQMKKRKSGHIIFITSSTPFGPWKELSTYTSARAGACTLANALSKELGEYNIPVFAIGPNYLHSEDSPYFYPTEPWKTNPEHVAHVKKVTALQRLGTQKELGELVAFLASGSCDYLTGQVFWLAGGFPLIERWPGMPE

SEQ ID NO: 577 - DNA, 774 bp, Artificial Sequence
  HHDH variant
  CDS (1)..(774)
atgagcaccgctatcgtcaccaacgtcaaacattttggaggtatgggtagcgctctgaggctgagcgaaggtggtcataccgtcgcttgccatgatgaaagctttaaacagaaagatgaactggaagcttttgctgaaacctacccacagctgaaaccaatgagcgaacaggaaccagctgaactgatcgaagctgtcaccagcgcttttggtcaggtcgatgtcctggtcagcaacgatatctttgctccagaatttcagccaatcgataaatatgctgtcgaagattacaggggtgctgtcgaagctctgcagatcaggccatttgctctagtgaatgctgtggcttcgcaaatgaagaagcgaaagtcggggcacatcatcttcatcacttcggctgcccaggaggggccatggaaggagctatcgacttacacttcggctcgagctggggctagtactctagctaatgctctatcgaaggagctaggagagtacaatatcccggtgttcgctatcgggccgaattacctacactcggaggattcgccgtacttctacccgactgagccgtggaagactaatccggagcacgtggctcacgtgaagaaggtgactgctctacaacgactagggactcaaaaagagttgggggaattggtggcatttttggcatctggctcttgtgattatttgactggccaggtgttttggttggcaggcggctttcccatgatagaacgttggcccggcatgcccgaataatgaggatcc

SEQ ID NO: 578 - protein, 254 aa, Artificial Sequence
  HHDH variant
MSTAIVTNVKHFGGMGSALRLSEGGHTVACHDESFKQKDELEAFAETYPQLKPMSEQEPAELIEAVTSAFGQVDVLVSNDIFAPEFQPIDKYAVEDYRGAVEALQIRPFALVNAVASQMKKRKSGHIIFITSAAQEGPWKELSTYTSARAGASTLANALSKELGEYNIPVFAIGPNYLHSEDSPYFYPTEPWKTNPEHVAHVKKVTALQRLGTQKELGELVAFLASGSCDYLTGQVFWLAGGFPMIERWPGMPE

SEQ ID NO: 579 - DNA, 774 bp, Artificial Sequence
  HHDH variant
  CDS (1)..(774)
atgagcaccgctatcgtcaccaacgtcaaacattttggaggtatgggtagcgctctgtggctgagcgaagctggtcataccgtcgcttgccatgatgaaagctttgaacagaaagatgaactggaagcttttgctgaaacctacccacagctgaaaccaatgagcgaacaggaaccagctgaactgatcgaagctgtcaccagcgcttacggtcaggtcgatgtcctggtcagcaacgatatctttgctccagaatttcagccaatcgataaatacgctgtcgaagattacaggggtgcagtcgaagctctgcagatcaggccatttgctctagtgaatgctgtggctccgcaaatgaagaaacgaaagtcggggcacatcatcttcatcacttcggctactccgttcgggccatggaaggagctatcgacttacacttcggctcgagctggggccagtactctagctaatgctctatcgaaggagctaggagagtacaatatcccggtgttcgctatcgggccgaattacctacactcggaggattcgccgtacttctacccgactgagccgtggaagactgatccggagcacgtggctcacgtgaagaaggtgactgctctacaacgactagggactcaaaaagagttgggggaattggtggcatttttggcatctggctcttgtgattatttgactggccaggtgttttggttggcaggcggctttcccatgatagaacgttggcccggcatgcccgaataatgaggatcc

SEQ ID NO: 580 - protein, 254 aa, Artificial Sequence
  HHDH variant
MSTAIVTNVKHFGGMGSALWLSEAGHTVACHDESFEQKDELEAFAETYPQLKPMSEQEPAELIEAVTSAYGQVDVLVSNDIFAPEFQPIDKYAVEDYRGAVEALQIRPFALVNAVAPQMKKRKSGHIIFITSATPFGPWKELSTYTSARAGASTLANALSKELGEYNIPVFAIGPNYLHSEDSPYFYPTEPWKTDPEHVAHVKKVTALQRLGTQKELGELVAFLASGSCDYLTGQVFWLAGGFPMIERWPGMPE

SEQ ID NO: 581 - DNA, 774 bp, Artificial Sequence
  HHDH variant
  CDS (1)..(774)
atgagcaccgctatcgtcactaacgtcaaacattttggtggtatgggtagcgctctgaggctgagcgaagctggtcataccgtcgcttgccatgatgaaagctttaaacagaaagatgaactggaagcttttgctgaaacctacccacagctgaaaccgatgcgtgaacaggaaccagctgaactgatcgaagctgtcaccagcgcttacggtcaggtcgatgtcctggtcagcaacgatatctttgctccagaatttcagccaatcgataaatacgctgtcgaagattacaggggtgctgtcgaagctctgcagatcaggccatttgctctagtgaatgctgtggcttcgcaaatgaagaagcgaaagtcggggcacatcatcttcatcacttcggctactccgttcgggccgtggaaggagctatcgacttacacttcggctcgagctggggcttgtactctagctaatgctctatcgaaggagctaggagagtacaatatcccggtgttcgctatcgggccgaattacctacactcggaggattcgccgtacttctacccgactgagccgtggaagactaatccggagcacgtggctcacgtgaagaaggtgactgctctacaacgactagggactcaaaaagagttgggggaattggtggcatttttggcatctggctcttgtgattatttgactggccaggtgttttggatggcaggcggctttcccatgatagaacgttggcccggcatgcccgaataatgaggatcc

SEQ ID NO: 582 - protein, 254 aa, Artificial Sequence
  HHDH variant
MSTAIVTNVKHFGGMGSALRLSEAGHTVACHDESFKQKDELEAFAETYPQLKPMREQEPAELIEAVTSAYGQVDVLVSNDIFAPEFQPIDKYAVEDYRGAVEALQIRPFALVNAVASQMKKRKSGHIIFITSATPFGPWKELSTYTSARAGACTLANALSKELGEYNIPVFAIGPNYLHSEDSPYFYPTEPWKTNPEHVAHVKKVTALQRLGTQKELGELVAFLASGSCDYLTGQVFWMAGGFPMIERWPGMPE

SEQ ID NO: 583 - DNA, 774 bp, Artificial Sequence
  HHDH variant
  CDS (1)..(774)
atgagcaccgctattgtcaccaacgtcaaacattttggaggtatgggtagcgctctgaagctgagcgaagctggtcataccgtcgcttgccatgatgaaagctttaaacagaaagatgatctggaagcttttgctgaagcctacccacagctgaaaccaatgagcgaacaggaaccagctgaactgatcgaagctgtcaccagcgcttacggtcaggtcgatgtcctggtcagcaacgatatctttgctccagaatttcagccaatcgataaatacgctgtcgaaaactacaggggtgctgtcgaagctctgcagatcaggccatttgctctagtgaatgctgtggcttcgcaaatgaagaaacgaaagtcggggcacatcatcttcatcacttcggctactccgttcgggccatggaaagagctatcgacttacacttcggctcgagctggggcttgtactctagctaatgctctatcgaaggagctaggagagtacaatgtgccggtgttcgctatcgggccgaattacctgcactcggaggattcgccgtacttctacccgactgagccgtggaagactaatccggagcacgtggctcacgtgaagaaggtgactgctctacaacgactagggactcaaaaagagttgggggaactggtggcattcctggcatctggctcttgtgattatttgactggccaggtgttttggttggcaggcggctttcccctaatagaacgttggcccggcatgcccgaataatgaggatcc

SEQ ID NO: 584 - protein, 254 aa, Artificial Sequence
  HHDH variant
MSTAIVTNVKHFGGMGSALKLSEAGHTVACHDESFKQKDDLEAFAEAYPQLKPMSEQEPAELIEAVTSAYGQVDVLVSNDIFAPEFQPIDKYAVENYRGAVEALQIRPFALVNAVASQMKKRKSGHIIFITSATPFGPWKELSTYTSARAGACTLANALSKELGEYNVPVFAIGPNYLHSEDSPYFYPTEPWKTNPEHVAHVKKVTALQRLGTQKELGELVAFLASGSCDYLTGQVFWLAGGFPLIERWPGMPE

SEQ ID NO: 585 - DNA, 774 bp, Artificial Sequence
  HHDH variant
  CDS (1)..(774)
atgagcaccgctattgtcaccaacgtcaaacattttggaggtatgggtagcgctctgcgtctgagcgaagctggtcataccgtcgcttgccatgatgaaagctttaagcatcaggatgaactagaagcttttgctgaaacctacccacagctgataccaatgagcgaacaggaaccagctgaactgattgaagctgtcaccagcgctcttggtcatgtcgatgtcctggtcagcaacgatatcgcgcctgtggaatggcggccaatcgataaatacgctgtcgaggattacagggatactgtcgaagctctgcagatcaagccatttgctctagtgaatggtgtcgcttcgcaaatgaagaagcgaaagtcggggcacatcatcttcatcacttcggctgccccgttcgggccatggaaggagctatcgacttactcttcggctcgagctggggctagtgcactagctaatgctctatcgaaggagctaggagagtacaatatcccggtgttcgctatcgctccgaattacctacactcgggggattcgccgtactattacccctctgagccgtggaagacttctccggagcacgtggctcacgtgcgtaagatgactgctctacaacgactagggactcaaaaagagttgggggaattggtgacgtttttggcatctggctcttgtgattatttgactggccaggtgttttggttggcaggcggctttcccgtcatcgaacgttggcccggcatgcccgaataatgaggatcc

SEQ ID NO: 586 - protein, 254 aa, Artificial Sequence
  HHDH variant
MSTAIVTNVKHFGGMGSALRLSEAGHTVACHDESFKHQDELEAFAETYPQLIPMSEQEPAELIEAVTSALGHVDVLVSNDIAPVEWRPIDKYAVEDYRDTVEALQIKPFALVNGVASQMKKRKSGHIIFITSAAPFGPWKELSTYSSARAGASALANALSKELGEYNIPVFAIAPNYLHSGDSPYYYPSEPWKTSPEHVAHVRKMTALQRLGTQKELGELVTFLASGSCDYLTGQVFWLAGGFPVIERWPGMPE

SEQ ID NO: 587 - DNA, 768 bp, Artificial Sequence
  HHDH variant
  CDS (1)..(768)
atgagcaccgctattgtcaccaacgtcaaacattttggaggtatgggtagcgctctgcgtctgagcgaagctggtcataccgtcgcttgccatgatgaaagctttaagcatcaggatgaactagaagcttttgctgaaacctacccacagctgataccaatgagcgaacaggaaccagctgaactgattgaagctgtcaccagcgctcttggtcatgtcgatgtcctggtcagcaacgatatcgcgcctgtggaatggcggccaatcgataaatacgctgtcgaggattacagggatactgtcgaagctctgcagatcaagccatttgctctagtgtatgctgccgcttcgcaaatgaagaagcgaaaggcggggcacatcatcttcatcacttcggctgccccgttcgggccatggaaggagctatcgacttactcttcggctcgagctggggctagtgcactagctaatgctctatcgaaggagctaggagagtacaatatcccggtgttcgctatcgctccgaattacctacactcgggggattcgccgtactattacccctctgagccgtggaagacttctccggagcacgtggctcacgtgcgtaaggtgactgctctacaacgactagggactcaaaaagagttgggggaattggtgacgtttttggcatctggctcttgtgattatttgactggccaggtgttttggctggcaggcggctttcccgttatcgaacgttggcccggcatgcccgaataatga

SEQ ID NO: 588 - protein, 254 aa, Artificial Sequence
  HHDH variant
MSTAIVTNVKHFGGMGSALRLSEAGHTVACHDESFKHQDELEAFAETYPQLIPMSEQEPAELIEAVTSALGHVDVLVSNDIAPVEWRPIDKYAVEDYRDTVEALQIKPFALVYAAASQMKKRKAGHIIFITSAAPFGPWKELSTYSSARAGASALANALSKELGEYNIPVFAIAPNYLHSGDSPYYYPSEPWKTSPEHVAHVRKVTALQRLGTQKELGELVTFLASGSCDYLTGQVFWLAGGFPVIERWPGMPE

SEQ ID NO: 589 - DNA, 774 bp, Artificial Sequence
  HHDH variant
  CDS (1)..(774)
atgagcaccgctattgtcaccaacgtcaaacattttggaggtatgggtagcgctctgcgtctgagcgaagctggtcataccgtcgcttgccatgatgaaagctttaagcatcaggatgaactagaagcttttgctgaaacctacccacagctgataccaatgagcgaacaggaaccagctgaactgattgaagctgtcaccagcgctcttggtcatgtcgatgtcctggtcagcaacgatatcgcgcctgtggaatggcggccaatcgataaatacgctgtcgaggattacagggatactgtcgaagctctgcagatcaagccatttgctctagtgaatgctgtcgcttcgcaaatgaacaagccaaagtcggggcacatcatcttcatcacttcggctgccccgttcgggccatggaaggagctatcgacttactcttcggctcgagctggggctagtgcactagctaatgctctatcgaaggagctaggagagtacaatatcccggtgttcgctatcgctccgaattacctacactcgggggattcgccgtactattacccctctgagccgtggaagacttctccggagcacgtggctcacgtgcgtaaggtgactgctctacaacgactagggactcaaaaagagttgggggaattggtgacgtttttggcatctggctcttgtgattatttgactggccaggtgttttggttggcaggcggctttcccgtcatcgaacgttggcccgggatgcccgaataatgaggatcc

SEQ ID NO: 590 - protein, 254 aa, Artificial Sequence
  HHDH variant
MSTAIVTNVKHFGGMGSALRLSEAGHTVACHDESFKHQDELEAFAETYPQLIPMSEQEPAELIEAVTSALGHVDVLVSNDIAPVEWRPIDKYAVEDYRDTVEALQIKPFALVNAVASQMNKPKSGHIIFITSAAPFGPWKELSTYSSARAGASALANALSKELGEYNIPVFAIAPNYLHSGDSPYYYPSEPWKTSPEHVAHVRKVTALQRLGTQKELGELVTFLASGSCDYLTGQVFWLAGGFPVIERWPGMPE

SEQ ID NO: 591 - DNA, 768 bp, Artificial Sequence
  HHDH variant
  CDS (1)..(768)
atgaagcccgctattgtcaccaacgtcaaacattttggaggtatgggtagcgctctgaaactgagcgaagctggtcataccgtcgcttgccatgatgaaagctttaagcataaagatgaactggaagcttttgctgaaacctacccacagctgcgtccaatgagcgaacaggaaccagctgaactgattgaagctgtcaccagcgcttttggtcatgtcgatgtcctggtcagcaacgatatcgctgctgtggaatggcggccaatcgataaatacgctgtcgaggattacaggggtgttgtcgaagctctgcagatcaagccatttgctctagtgaatgctgtggcttcgcaaatgaaggagcgaaagtcggggcacatcatcttcatcacttcggctgccccgttcgggccatggaaggagctatcgacttactcttcggctcgagctgggactagtgcactagctaatgctctatcgaaggagctaggagagtacaatatcccggtgttcgctatcgctccgaattacctacactcggaggattcgccgtactattaccccactgagccgtggaagattaatccggagcacgtgactcacgtgcgtaaggtgactgctctacaacgactagggactcaaaaagagttgggggaattggtggcatttttggcatctggctcttgtgattatttgactggccaggtgttttggttggcaggcggctttcccgtcatagaacgttggcccggcatgcccgaataatga

SEQ ID NO: 592 - protein, 254 aa, Artificial Sequence
  HHDH variant
MKPAIVTNVKHFGGMGSALKLSEAGHTVACHDESFKHKDELEAFAETYPQLRPMSEQEPAELIEAVTSAFGHVDVLVSNDIAAVEWRPIDKYAVEDYRGVVEALQIKPFALVNAVASQMKERKSGHIIFITSAAPFGPWKELSTYSSARAGTSALANALSKELGEYNIPVFAIAPNYLHSEDSPYYYPTEPWKINPEHVTHVRKVTALQRLGTQKELGELVAFLASGSCDYLTGQVFWLAGGFPVIERWPGMPE

SEQ ID NO: 593 - DNA, 768 bp, Artificial Sequence
  HHDH variant
  CDS (1)..(768)
atgagcaccgctattgtcaccaacgtcaaacattttggaggtatgggtagcgctctgaggctgagcgaagctggtcataccgtcgcttgccatgatgaaagctttaagcataaagatgaactggaagcttttgctgaaacctacccacagctgaaaccaatgagcgaacaggaaccagctgaactgattgaagctgtcaccagcgcttttggtcaggtcgatgtcctggtcagcaacgatatctttgctctagaatttcggccaatcgataaatacgctgtcgaggattacaggggtgctgtcgaagctctgcagatcaggccatttgctctagtgaatgctgtggcttcgcaaatgaaggagcgaaagtcggggcacatcatcttcatcacttcggctgccccgttcgggccatggaaggagctatcgacttactcttcggctcgagctggggctagtgcactagctaatgctctatcgaaggagctaggagagtacaatatcccggtgttcgctatcgggccgaattacctacactcggaggattcgccgtactattaccccactgagccgtggaagattaatccggagcacgtggctcacgtgaagaaggtgactgctctacaacgactagggactcaaaaagagttgggggaattggtggcatttttggcatctggctcttgtgactatttgactggccaggtgttttggttgagcggcggctttcccgtcatagaacgttggcccggcatgcccgaataatga

SEQ ID NO: 594 - protein, 254 aa, Artificial Sequence
  HHDH variant
MSTAIVTNVKHFGGMGSALRLSEAGHTVACHDESFKHKDELEAFAETYPQLKPMSEQEPAELIEAVTSAFGQVDVLVSNDIFALEFRPIDKYAVEDYRGAVEALQIRPFALVNAVASQMKERKSGHIIFITSAAPFGPWKELSTYSSARAGASALANALSKELGEYNIPVFAIGPNYLHSEDSPYYYPTEPWKINPEHVAHVKKVTALQRLGTQKELGELVAFLASGSCDYLTGQVFWLSGGFPVIERWPGMPE

SEQ ID NO: 595 - DNA, 774 bp, Artificial Sequence
  HHDH variant
  CDS (1)..(774)
atgagcaccgctattgtcaccaacgtcaaacattttggaggtatgggtagcgctctgcgtctgagcgaagctggtcataccgtcgcttgccatgatgaaagctttaagcatcaggatgaactagaagcttttgctgaaacctacccacagctgataccaatgagcgaacaggaaccagctgaactgattgaagctgtcaccagcgctcttggtcatgtcgatgtcctggtcagcaacgatatcgcgcctgtggaatggcggccaatcgataaatacgctgtcgaggattacagggatactgtcgaagctctgcagatcaagccatttgctctagtgaatgctgtcgcttcgcaaatgaaggagcgaaagtcggggcacatcatcttcatcacttcggctgccccgttcgggccatggaaggagctatcgacttactcttcggctcgagctggggctagtgcactagctaatgctctatcgaaggagctaggagagtacaatatcccggtgttcgctatcgctccgaattacctacactcgggggattcgccgtactattacccctctgagccgtggaaaacttctccggagcacgtggctcacgtgcgtaaggtgactgctctacaacgactagggactcaaaaagagttgggggaattggtgacgtttttggcatctggctcttgtgattatttgactggccaggtgttttggttggcaggcggctttcccgtcatcaaacgttggcccggcatgcccgaataatgaggatcc

SEQ ID NO: 596 - protein, 254 aa, Artificial Sequence
  HHDH variant
MSTAIVTNVKHFGGMGSALRLSEAGHTVACHDESFKHQDELEAFAETYPQLIPMSEQEPAELIEAVTSALGHVDVLVSNDIAPVEWRPIDKYAVEDYRDTVEALQIKPFALVNAVASQMKERKSGHIIFITSAAPFGPWKELSTYSSARAGASALANALSKELGEYNIPVFAIAPNYLHSGDSPYYYPSEPWKTSPEHVAHVRKVTALQRLGTQKELGELVTFLASGSCDYLTGQVFWLAGGFPVIKRWPGMPE

SEQ ID NO: 597 - DNA, 768 bp, Artificial Sequence
  HHDH variant
  CDS (1)..(768)
atgagcaccgttattgtcaccaatgtcaaacattttggaggtatgggtgcggctctgaggctgagcgaagctggtcataccgtcgcttgccatgatgaaagctttaaacagaaagatgaactggaagcttttgctgaaacctacccacagctgaaaccaatgagcgaacaggaaccagctgaactgatcgaagctgtcaccagcgcttacggtcaggtcgatgtcctggtcagcaacgatatctttgctccagaatttcagccaatcgataaatacgctgtcgaagattacaggggtgctgtcgaagctctgcagatcaggccatttgctctagtgaatgctgtggcttcgcaaatgaaggagcgaaagtcggggcacatcatcttcatcacttcggctactccgttcgggccatggaaggagctatcgacttacacttcggctcgagctggggcttgtactctagctaatgctctatcgaaggagctaggagagtacaatatcccggtgttcgccatcgggccgaattacctacactcggaggattcgccgtacttctacccgactgagccgtggaagactaatccggagcacgtggctcacgtgaagaaggtgactgctctacaacgactagggactcaaaaagagttgggggaattggtggcatttttggcatctggctcttgtgattatttgactggccaggtgttttggttggcaggcggctttcccatgatagaacgttggcccggcatgcccgaataatga

SEQ ID NO: 598 - protein, 254 aa, Artificial Sequence
  HHDH variant
MSTVIVTNVKHFGGMGAALRLSEAGHTVACHDESFKQKDELEAFAETYPQLKPMSEQEPAELIEAVTSAYGQVDVLVSNDIFAPEFQPIDKYAVEDYRGAVEALQIRPFALVNAVASQMKERKSGHIIFITSATPFGPWKELSTYTSARAGACTLANALSKELGEYNIPVFAIGPNYLHSEDSPYFYPTEPWKTNPEHVAHVKKVTALQRLGTQKELGELVAFLASGSCDYLTGQVFWLAGGFPMIERWPGMPE

SEQ ID NO: 599 - DNA, 774 bp, Artificial Sequence
  HHDH variant
  CDS (1)..(774)
atgagcaccgctatcgtcaccacggtcaaacattttggaggtatgggtagcgctctgaggctgagcgaagctggtcataccgtcgcttgccatgatgaaagctttaaacagaaagatgaactggaagcttttgctgaaacctacccacagctgaaaccaatgagcgaacaggaaccagctgaactgatcgaagctgtcaccagcgcttacggtcaggtctatgtcctggtcagcaacgatatctttgctccagaatttcagccaatcgataaatacgctgtcgaagattacaggggtgctgtcgaagctctgcagatcaggccatttgctctagtgaatgctgtggcttcgcaaatgaagaagccaaagtcggggcacatcatcttcatcacttcggctactccgttcgggccatggaaggagctatcgacttacacttcggctcgagctggggcttgtactctagctaatgctctatcgaaggagctaggagagtacaatatcccggtgttcgctatcgggccgaattacctacactcggaggattcgccgtacttctacccgactgagccgtggaagactaatccggagcacgtggctcacgtgaaggaggtgattgctctacaacgactagggactcaaaaagagttgggggaattggtggcatttttggcatctggctcttgtgattatctgactgtgcaggtggtgtggctggcaggcggctttccgatgatcgaacgttggccgggcatgcccgaataatgaggatcc

SEQ ID NO: 600 - protein, 254 aa, Artificial Sequence
  HHDH variant
MSTAIVTTVKHFGGMGSALRLSEAGHTVACHDESFKQKDELEAFAETYPQLKPMSEQEPAELIEAVTSAYGQVYVLVSNDIFAPEFQPIDKYAVEDYRGAVEALQIRPFALVNAVASQMKKPKSGHIIFITSATPFGPWKELSTYTSARAGACTLANALSKELGEYNIPVFAIGPNYLHSEDSPYFYPTEPWKTNPEHVAHVKEVIALQRLGTQKELGELVAFLASGSCDYLTVQVVWLAGGFPMIERWPGMPE

SEQ ID NO: 601 - DNA, 768 bp, Artificial Sequence
  HHDH variant
  CDS (1)..(768)
atgagcaccgctattgtcaccaacgtcaaacattttggaggtatgggtagcgctctgaggctgagcgaagctggtcataccgtcgcttgccatgatgaaagctttaagcataaagatgaactggaagcttttgctgaaacctacccacagctgaaaccaatgagcgaacaggagccagctgaactgattgaagctgtcaccagcgcttttggtcaggtcgatgtcctggtcagcaacgatatctttgctctagaatttcggccaatcgataaatacgctgtcgaggattacaggggtgctgtcgaagctctgcagatcaggccatttgctctagtgaatgctgtggcttcgcaaatgaagaagcgaaagtcggggcacatcatcttcgtcacttcggctgccccgttcgggccatggaaggagctatcgacttactcttcggctcgagctggggctagtgcactagctaatgctctatcgaaggagctaggagagtacaatatcccggtgttcgctatcgggccgaattacctacactcggaggattcgccgtactattaccccactgagccgtggaagattaatccggagcacgtggctcacgtgaagaaggtgactgctctacaacgactagggactcaaaaagagttgggggaattggtggcatttttggcatctggctcttgtgattatttgactggccaggtgttttggttggcaggcggctttcccgtcatagaacgttggcccggcatgcccgaataatga

SEQ ID NO: 602 - protein, 254 aa, Artificial Sequence
  HHDH variant
MSTAIVTNVKHFGGMGSALRLSEAGHTVACHDESFKHKDELEAFAETYPQLKPMSEQEPAELIEAVTSAFGQVDVLVSNDIFALEFRPIDKYAVEDYRGAVEALQIRPFALVNAVASQMKKRKSGHIIFVTSAAPFGPWKELSTYSSARAGASALANALSKELGEYNIPVFAIGPNYLHSEDSPYYYPTEPWKINPEHVAHVKKVTALQRLGTQKELGELVAFLASGSCDYLTGQVFWLAGGFPVIERWPGMPE

SEQ ID NO: 603 - DNA, 774 bp, Artificial Sequence
  HHDH variant
  CDS (1)..(774)
atgagcaccgctattgtcaccaacgtcaaacattttggaggtatgggtagcgctctgcgtctgagcgaagctggtcataccgtcgcttgccatgatgaaagctttaagcatcaggatgaactagaagcttttgctgaaacctacccacagctgataccaatgagcgaacaggaaccagctgaactgattgaagctgtcaccagcgctcttggtcatgtcgatgtcctggtcagcaacgatatcgcgcctgtggaatggcggccaatcgataaatacgctgtcgaggattacagggatactgtcgaagctctgcagatcaagccatttgctctagtgaatgctgtcgcttcgcaaatgaagaagcgaaagtcggggcacatcatcttcatcacttcggctgcaccgttcgggccacataaggagatctcgacttactcttcggcccgagctggggctagtgcactagctaatgctctatcgaaggagctaggagagtacaatatcccggtgttcgctatcgctccgaattacctacactcgggggattcgccgtactattacccctctgagccgtggaagacttctccggagcacgtggctcacgtgcgtaaggtgactgctctacaacgactagggactcaaaaagagttgggggaattggtgacgtttttggcatctggctcttgtgattatttgactggccaggtgttttggttggcaggcggctttcccgtcatcgaacgttggcccggcatgcccgaataatgaggatcc

SEQ ID NO: 604 - protein, 254 aa, Artificial Sequence
  HHDH variant
MSTAIVTNVKHFGGMGSALRLSEAGHTVACHDESFKHQDELEAFAETYPQLIPMSEQEPAELIEAVTSALGHVDVLVSNDIAPVEWRPIDKYAVEDYRDTVEALQIKPFALVNAVASQMKKRKSGHIIFITSAAPFGPHKEISTYSSARAGASALANALSKELGEYNIPVFAIAPNYLHSGDSPYYYPSEPWKTSPEHVAHVRKVTALQRLGTQKELGELVTFLASGSCDYLTGQVFWLAGGFPVIERWPGMPE

SEQ ID NO: 605 - DNA, 774 bp, Artificial Sequence
  HHDH variant
  CDS (1)..(774)
atgagcaccgctattgtcaccaacgtcaaacattttggaggtatgggtagcgctctgcgtctgagcgaagctggtcataccgtcgcttgccatgatgaaagctttaagcatcaggatgaactagaagcttttgctgaaacctacccacagctgataccaatgagcgaacaggaaccagctgaactgattgaagctgtcaccagcgctcttggtcatgtcgatgtcctggtcagcaacgatatcgcgcctgtggaatggcggccaatcgataaatacgctgtcgaggattacagggatactgtcgaagctctgcagatcaagccatttgctctagtgaatgctgtcgcttcgcaaatgaagaagcgaaagtcggggcacatcatcttcatcacttcggctgcaccgttcgggccacataaggagctctcgacttactcttcggctcgagctggggctagtgcactagctaatgctctatcgaaggagctaggagagtacaatatcccggtgttcgctatcgctccgaagtacctacactcgggggattcgccgtactattacccctctgagccgtggaagacttctccggagcacgtggctcacgtgcgtaaggtgactgctctacaacgactagggactcaaaaagagttgggggaattggtgacgtttttggcatctggctcttgtgattatttgactggccaggtgttttggttggcaggcggctttcccgtcatcgaacgttggcccggcatgcccgaataatgaggatcc

SEQ ID NO: 606 - protein, 254 aa, Artificial Sequence
  HHDH variant
MSTAIVTNVKHFGGMGSALRLSEAGHTVACHDESFKHQDELEAFAETYPQLIPMSEQEPAELIEAVTSALGHVDVLVSNDIAPVEWRPIDKYAVEDYRDTVEALQIKPFALVNAVASQMKKRKSGHIIFITSAAPFGPHKELSTYSSARAGASALANALSKELGEYNIPVFAIAPKYLHSGDSPYYYPSEPWKTSPEHVAHVRKVTALQRLGTQKELGELVTFLASGSCDYLTGQVFWLAGGFPVIERWPGMPE

SEQ ID NO: 607 - DNA, 774 bp, Artificial Sequence
  HHDH variant
  CDS (1)..(774)
atgagcaccgctattgtcaccaacgtcaaacattttggaggtatgggtagcgctctgcgtctgagcgaagctggtcataccgtcgcttgccatgatgaaagctttaagcatcaggatgaactagaagcttttgctgaaacctacccacagctgataccaatgagcgaacaggaaccagctgaactgattgaagctgtcaccagcgctcttggtcatgtcgatgtcctggtcagcaacgatatcgcgcctgtggaatggcggccaatcgataaatacgctgtcgaggattacagggatactgtcgaagctctgcagatcaagccatttgctctagtgaatgctgtcgcttcgcaaatgaagaagcgaaagtcggggcacatcatcttcatcacttcggctgccccgttcgggccacataaggaggtctcgacttactcttcggctcgagctggggctagtgcactagctaatgctctatcgaaggagctaggagagtacaatatcccggtgttcgctatcgctccgaattacctacactcgggggattcgccgtactattacccctctgagccgtggaagacttctccggagcacgtggctcacgtgcgtaaggtgactgctctacaacgactagggactcaaaaagagttgggggaattggtgacgtttttggcatctggctcttgtgattatttgactggccaggtgttttggttggcaggcggctttcccgtcatcgaacgttggcccggcatgcccgaataatgaggatcc

SEQ ID NO: 608 - protein, 254 aa, Artificial Sequence
  HHDH variant
MSTAIVTNVKHFGGMGSALRLSEAGHTVACHDESFKHQDELEAFAETYPQLIPMSEQEPAELIEAVTSALGHVDVLVSNDIAPVEWRPIDKYAVEDYRDTVEALQIKPFALVNAVASQMKKRKSGHIIFITSAAPFGPHKEVSTYSSARAGASALANALSKELGEYNIPVFAIAPNYLHSGDSPYYYPSEPWKTSPEHVAHVRKVTALQRLGTQKELGELVTFLASGSCDYLTGQVFWLAGGFPVIERWPGMPE

SEQ ID NO: 609 - DNA, 768 bp, Artificial Sequence
  HHDH variant
  CDS (1)..(768)
atgagcaccgctattgtcaccaacgtcaaacattttggaggtatgggtagcgctctgcgtctgagcgaagctggtcataccgtcgcttgccatgatgaaagctttaagcatcaggatgaactggaagcttttgctgaaacctacccacagctgatcccaatgagcgaacaggaaccagctgaactgattgaagctgtcaccagcgctcttggtcaggtcgatgtcctggtcagcaacgatatctatcctgtggaatggcggccaatcgataaatacgctgtcgaggattacaggggtactgtcgaagctctacagatcaagccatttgctctagtgaatgctgtcgcttcgcaaatgaagaagcgaaagtcggggcacatcatcttcatcacttcggctgcaccgttcgggccacataaggagatctcgacttactcttcggctcgagctggggctagtgcactagctaatgctctatcgaaggagctaggagagtacaatatcccggtgttcgctatcgctccgaattacctacactcgggggattcgccgtactattacccctctgagccgtggaagacttctccggagcacgtggctcacgtgcgtaaggtgactgctctacaacgactagggactcaaaaagagctgggggaattggtggcatttttggcatctggctcttgtgattatttgactggccaggtgttttggttgacaggcggctttcccgtcatcgaacgttggcccggcatgcccgaataatga

SEQ ID NO: 610 - protein, 254 aa, Artificial Sequence
  HHDH variant
MSTAIVTNVKHFGGMGSALRLSEAGHTVACHDESFKHQDELEAFAETYPQLIPMSEQEPAELIEAVTSALGQVDVLVSNDIYPVEWRPIDKYAVEDYRGTVEALQIKPFALVNAVASQMKKRKSGHIIFITSAAPFGPHKEISTYSSARAGASALANALSKELGEYNIPVFAIAPNYLHSGDSPYYYPSEPWKTSPEHVAHVRKVTALQRLGTQKELGELVAFLASGSCDYLTGQVFWLTGGFPVIERWPGMPE

SEQ ID NO: 611 - DNA, 774 bp, Artificial Sequence
  HHDH variant
  CDS (1)..(774)
atgagcaccgctattgtcaccaacgtcaaacattttggaggtatgggtagcgctctgcgtctgagcgaagctggtcataccgtcgcttgccatgatgaaaggtttaagcatcaggatgaactagaagcttttgctgaaacctacccacagctgataccaatgagcgaacaggaaccagctgaactgattgaagctgtcaccagcgctcttggtcatgtcgatgtcctggtcagcaacgatatcgcgcctgtggaatggcggccaatcgataaatacgctgtcgaggattacagggatactgtcgaagctctgcagatcaagccatttgctctagtgaatgctgtcgcttcgcaaatgaagaagcgaaagtcggggcacatcatcttcatcacttcggctggaccgttcgggccacataaggaggtctcgacttactcttcggctcgagctggggctagtgcactagctaatgctctatcgaaagagctaggagagtacaatatcccggtgttcgctatcgctccggagtacctacactcgggggattcgccgtactattacccctctgagccgtggaagacttctccggagcacgtggctcacgtgcgtaaggtgactgctctacaacgactagggactcaaaaagagttgggggaattggtgacgtttttggcatctggctcttgtgattatttgactgaccaggtgttttggttggcaggcggctttcccgtcatcgaacgttggcccggcatgcccgaataatgaggatcc

SEQ ID NO: 612 - protein, 254 aa, Artificial Sequence
  HHDH variant
MSTAIVTNVKHFGGMGSALRLSEAGHTVACHDERFKHQDELEAFAETYPQLIPMSEQEPAELIEAVTSALGHVDVLVSNDIAPVEWRPIDKYAVEDYRDTVEALQIKPFALVNAVASQMKKRKSGHIIFITSAGPFGPHKEVSTYSSARAGASALANALSKELGEYNIPVFAIAPEYLHSGDSPYYYPSEPWKTSPEHVAHVRKVTALQRLGTQKELGELVTFLASGSCDYLTDQVFWLAGGFPVIERWPGMPE

SEQ ID NO: 613 - DNA, 774 bp, Artificial Sequence
  HHDH variant
  CDS (1)..(774)
atgagcaccgctattgtcaccaacgtcaaacattttggaggtatgggtagcgctctgcgtctgagcgaagctggtcataccgtcgcttgccatgatgaaagctttaagcatcaggatgaactagaagcttttgctgaaacccacccacagctgataccaatgagcgaacaggaaccagctgaactgattgaagctgtcaccagcgctcttggtcatgtcgatgtcctggtcagcaacgatatcgcgcctgtggaatggcggccaatcgataaatacgctgtcgaggattacagggatactgtcgaagctctgcagatcaagccatttgctctagtgaatgctgtcgcttcgcaaatgaagaagcgaaagtcggggcacatcatcttcatcacttcggctgcaccgttcgggccatggaaggagatctcgacttactcttcggctcgagctggggctagtgcactagctaatgctctatcgaaggagctaggagagtacaatatcccggtgttcgctatcgctccgaattacctacacaccggggattcgccgtactattacccctctgagccgtggaagacttctccggagcacgtggctcacgtgcgtaaggtgactgctctacaacgactagggactcaaaaagagttgggggaattggtgacgtttttggcatctggctcttgtgattatttgactggccaggtgttttggttggcaggcggctttcccgtcatcgaacgttggcccggcatgcccgaataatgaggatcc

SEQ ID NO: 614 - protein, 254 aa, Artificial Sequence
  HHDH variant
MSTAIVTNVKHFGGMGSALRLSEAGHTVACHDESFKHQDELEAFAETHPQLIPMSEQEPAELIEAVTSALGHVDVLVSNDIAPVEWRPIDKYAVEDYRDTVEALQIKPFALVNAVASQMKKRKSGHIIFITSAAPFGPWKEISTYSSARAGASALANALSKELGEYNIPVFAIAPNYLHTGDSPYYYPSEPWKTSPEHVAHVRKVTALQRLGTQKELGELVTFLASGSCDYLTGQVFWLAGGFPVIERWPGMPE

SEQ ID NO: 615 - DNA, 774 bp, Artificial Sequence
  HHDH variant
  CDS (1)..(774)
atgagcaccgctattgtcaccaacgtcaaacattttggaggtatgggtagcgctctgcgtctgagcgaagctggtcataccgtcgcttgccatgatgaaagctttaagcatcaggatgaactagaagcttttgctgaaacctacccacagctgataccaatgagcgagcaggaaccagctgaactgattgaagctgtcaccagcgctcttggtcatgtcgatgtcctggtcagcaacgacatcgcgcctgtggaatggcggccaatcgataaatacgctgtcgaggattacagggatactgtcgaagctctgcagatcaagccatttgctctagtgaatgctgtcgcttcgcaaatgaagaagcgaaagtcggggcacatcatcttcatcacttcggctgccccgttcgggccaaaaaaggagatctcgacttactcttcggctcgagctggggctagtgcactggctaatgctctatcgaaggagctaggagagtacaatatcccggtgttcgctatcgctccgaattacctacacagcggggattcgccgtactattacccctctgagccgtggaagacttctccggagcacgtggctcacgtgcgtaaggtgactgctctacaacgactagggactcaaaaagagttgggggaattggtgacgtttttggcatctggctcttgtgattatttgactggccaggtgttttggttggcaggcggctttcccgtcatcgaacgttggcccggcatgcccgaataatgaggatcc

SEQ ID NO: 616 - protein, 254 aa, Artificial Sequence
  HHDH variant
MSTAIVTNVKHFGGMGSALRLSEAGHTVACHDESFKHQDELEAFAETYPQLIPMSEQEPAELIEAVTSALGHVDVLVSNDIAPVEWRPIDKYAVEDYRDTVEALQIKPFALVNAVASQMKKRKSGHIIFITSAAPFGPKKEISTYSSARAGASALANALSKELGEYNIPVFAIAPNYLHSGDSPYYYPSEPWKTSPEHVAHVRKVTALQRLGTQKELGELVTFLASGSCDYLTGQVFWLAGGFPVIERWPGMPE

SEQ ID NO: 617 - DNA, 768 bp, Artificial Sequence
  HHDH variant
  CDS (1)..(768)
atgagcaccgctattgtcaccaacgtcaaacattttggaggtatgggtagcgctctgcgtctgagcgaagctggtcataccgtcgcttgccatgatgaaagctttaagcatcaggatgaactggaagcttttgctgaaacctacccacagctgatcccaatgagcgaacaggaaccagctgaactgattgaagctgtcaccagcgctcttggtcaggtcgatgtcctggtcagcaacgatatctatcctgtggaatggcggccaatcgataaatacgctgtcgaggattacaggggtactgtcgaagctctgcagatcaagccatttgctctagtgaatgctgtcgcttcgcaaatgaagaagcgaaagtcggggcacatcatcttcatcacttcggctgccccgttcgggccaaaaaaggagatctcgacttactcttcggctcgagctggggctagtgcactagctaatgctctatcgaaggagctaggagagtacaatatcccggtgttcgctatcgctccgaattacctacactcgggggattcgccgtactattacccctctgagccgtggaagacttctccggagcacgtggctcacgtgcgtaaggtgactgctctacaacgactagggactcaaaaagagctgggggaattggtggcatttttggcatctggctcttgtgattatttgactggccaggtgttttggttgacaggcggctttcccgtcatcgaacgttggcccggcatgcccgaataatga

SEQ ID NO: 618 - protein, 254 aa, Artificial Sequence
  HHDH variant
MSTAIVTNVKHFGGMGSALRLSEAGHTVACHDESFKHQDELEAFAETYPQLIPMSEQEPAELIEAVTSALGQVDVLVSNDIYPVEWRPIDKYAVEDYRGTVEALQIKPFALVNAVASQMKKRKSGHIIFITSAAPFGPKKEISTYSSARAGASALANALSKELGEYNIPVFAIAPNYLHSGDSPYYYPSEPWKTSPEHVAHVRKVTALQRLGTQKELGELVAFLASGSCDYLTGQVFWLTGGFPVIERWPGMPE

SEQ ID NO: 619 - DNA, 774 bp, Artificial Sequence
  HHDH variant
  CDS (1)..(774)
atgagcaccgctatcgtcaccaacgtcaaacattttggaggtatgggtagcgctctgaggctaagcgaagctggtctgaccgtcgcttgccatgatgaaagctttaaacagaaagatgaactggaagcttttgctgaaacctacccacagctgaaaccaatgagcgaacaggaaccagctgaactgatcgaagctgtcaccagcgcttacggtcaggtcgatgtcctggtcagcaacgatatctttgctccagaatttcagccaatcgataaatacgctgtcgaagattacaggggtgctgtcgaagctctgcagatcaggccatttgctctagtgaatgctgtggcttcgcaaatgaagaagcgaaagtcggggcacatcatcttcatcacttcggctactccgttcgggccatggaaggagctatcgacttacacttcggctcgagctggggcttgtactctagctaatgctctatcgaaggagctaggagagtacaatatcccggtgttcgctatcgggccgaattacctacactcggaggattcgccgtacttctacccgactgagccgtggaagactaatccggagcacgtggctcacgtgaagaaggtgactgctctacaacgactagggactcaaaaagagttgggggaattggtggcatttttggcatctggctcttgtgattatttgactggccaggtgttttggttgaccggcggctttcccatgatagaacgttgggccggcatgcccgaataatgaggatcc

SEQ ID NO: 620 - protein, 254 aa, Artificial Sequence
  HHDH variant
MSTAIVTNVKHFGGMGSALRLSEAGLTVACHDESFKQKDELEAFAETYPQLKPMSEQEPAELIEAVTSAYGQVDVLVSNDIFAPEFQPIDKYAVEDYRGAVEALQIRPFALVNAVASQMKKRKSGHIIFITSATPFGPWKELSTYTSARAGACTLANALSKELGEYNIPVFAIGPNYLHSEDSPYFYPTEPWKTNPEHVAHVKKVTALQRLGTQKELGELVAFLASGSCDYLTGQVFWLTGGFPMIERWAGMPE

SEQ ID NO: 621 - DNA, 765 bp, Artificial Sequence
  HHDH variant
  CDS (1)..(765)
atgagcaccgctatcgtcaccaacgtcaaacattttggaggtatgggtagcgctctgaggctgagcgaagctggtcataccgtcgcttgccatgatgaaagctttaaacagaaagatgaactggaagcttttgctgaaacctacccacagctgaaaccaatgagcgaacaggaaccagctgaactgatcgaagctgtcaccagcgcttacggtcaggtcgatgtcctggtcagcaacgatatctttgctccagaatttcagccaatcgataaatacgctgtccaagattacaggggtgctgtcgaagctctgcagatcaggccatttgctctagtgaatgctgtggcttcgcaaatgaagaagcgaaagtcggggcacatcatcttcatcacttcggctactccgttcgggccatggaaggagctatcgagttacacttcggctcgagctggggcttgttccctagctaatgctctatcgaaggagctaggagagtacaatatcccggtgttcgctatcgggccgaattacctacactcggaggattcgccgtacttctacccgactgagccgtggaagactaatccggagcacgtggctcacgtgaagaaggtgactgctctacaacgactagggactcaaaaagagttgggggaattggtggcatttttggcatctggctcttgtgattatttgactggccaggtgttttggttggcaggcggctttcccatgatagaacgttggcccggcatgcccgaataa

SEQ ID NO: 622 - protein, 254 aa, Artificial Sequence; identical to SEQ ID NO: 48
  HHDH variant

SEQ ID NO: 623 - DNA, 771 bp, Artificial Sequence
  HHDH variant
  CDS (1)..(771)
atgagcaccgctatcgtcaccaacgtcaaacattttggaggtatgggtagcgctctgaggctgagcgaagctggtcataccgtcgcttgccatgatgaaagctttaaacagaaagatgaactggaagcttttgctgaaacctacccacagctgaaaccaatgagcgaacaggaaccagctgaactgatcgaagctgtcaccagcgcttacggtcaggtcgatgtcctggtcagcaacgatatctttgctccagaatttcagccagtggacaaatactcagtcgaagattacaggggtgctgtcgaagctctgcagatcaggccatttgctctagtgaatgctgtggcttcgcaaatgaagaagcgaaagtcggggcacatcatcttcatcacttcggctactccgttcgggccatggaaggagctatcgacttacacttcggctcgagctggggcttgtactctagctaatgctctatcgaaggagctaggagagtacaatatcccggtgttcgctatcgggccgaattacctacactcggaggattcgccgtacttctacccgactgagccgtggaagactaatccggagcacgtggctcacgtgaagaaggtgactgctctacaacgactagggactcaaaaagagttgggggaattggtggcatttttggcatctggctcttgtgattatttgactggccaggtgttttggttggcaggcggctttcccatgatagaacgttggcccggcatgcccgaataatgagga

SEQ ID NO: 624 - protein, 254 aa, Artificial Sequence
  HHDH variant
MSTAIVTNVKHFGGMGSALRLSEAGHTVACHDESFKQKDELEAFAETYPQLKPMSEQEPAELIEAVTSAYGQVDVLVSNDIFAPEFQPVDKYSVEDYRGAVEALQIRPFALVNAVASQMKKRKSGHIIFITSATPFGPWKELSTYTSARAGACTLANALSKELGEYNIPVFAIGPNYLHSEDSPYFYPTEPWKTNPEHVAHVKKVTALQRLGTQKELGELVAFLASGSCDYLTGQVFWLAGGFPMIERWPGMPE

SEQ ID NO: 625 - DNA, 774 bp, Artificial Sequence
  HHDH variant
  CDS (1)..(774)
atgagcaccgctatcgtcaccaacgtcaaacattttggaggtatgggtagcgctctgaggctgagcgaagctggtcataccgtcgcttgccatgatgaaagctttaaacagaaagatgaactggaagcttttgctgaaacctttccacagctgaaaccaatgagcgaacaggaaccagctgaactgatcgaagctgtcaccagcgcttacggtcaggtcgatgtcctggtcagcaacgatatctttgctccagaatttcagccaatcgataaatacgctgtcgaagattacaggggtgctgtcgaagctctgcagatcaggccatttgctctagtgaatgctgtggcttcgcaaatgaagaagcgaaagtcggggcacatcatcttcatcacttcggctactccgttcgggccatggaaggagctatcgacttacacttcggctcgagctggggcttgtactctagctaatgctctatcgaaggagctaggagagtacaatgtgccggtgttcgctatcgggccgaattacctacactcggaggattcgccgtacttccacccgactgagccgtggaagactaatccggagcacgtggctcacgtgaagaaggtgactgctctacaacgactagggactcaaaaagagttgggggaattggtggcatttttggcatctggctcttgtgattatttgactggccaggtgttttggttggcaggcggctttcccatgatagaacgttggcccggcatgcccgaataatgaggatcc

SEQ ID NO: 626 - protein, 254 aa, Artificial Sequence
  HHDH variant
MSTAIVTNVKHFGGMGSALRLSEAGHTVACHDESFKQKDELEAFAETFPQLKPMSEQEPAELIEAVTSAYGQVDVLVSNDIFAPEFQPIDKYAVEDYRGAVEALQIRPFALVNAVASQMKKRKSGHIIFITSATPFGPWKELSTYTSARAGACTLANALSKELGEYNVPVFAIGPNYLHSEDSPYFHPTEPWKTNPEHVAHVKKVTALQRLGTQKELGELVAFLASGSCDYLTGQVFWLAGGFPMIERWPGMPE

SEQ ID NO: 627 - DNA, 768 bp, Artificial Sequence
  HHDH variant
  CDS (1)..(768)
atgaacaccgctattgtcacgaacgtcaaacattttggaggtatgggtagcgctctgcgtctgagcgaagctggtcataccgtcgcttgccatgatgaaagctttaagcatcaggatgaactggaagcttttgctgacgcctacccacagctgataccaatgagcgaacaggaaccagctgaactgattgaagctgtcaccagcgcttatggtcaggtcgatgtcctggtcagcaacgatatcgctgctgtggaatggcggccaatcgataaatacgctgtcgaggattacaggggtgttgtcgaagctctgcagatccgcccatttgctctagtgaatgctgtggcttcgcaaatgaagaagcgaaagtcggggcacatcatcttcatcacttcggctgccccgttcgggccatggaaggagctatcgacttactcttcggctcgagctgggactagtgcactagctaatgctctatcgaaggagctaggagagtacaatatcccggtgttcgctatcgctccgaattacctacactcggaggattcgccgtactattacccctctgagccgtggaagactaatccggagcacgtggctcacgtgcgtaaggtgactgctctacgtcgactagggactcaaaaagagttgggggaattggtgacatttttggcatctggctcttgtgattatttgactggccaggtgttttggttggcaggcggctttcccgtcatcgaacgttggcccggcatgcccgaataatga

SEQ ID NO: 628 - protein, 254 aa, Artificial Sequence
  HHDH variant
MNTAIVTNVKHFGGMGSALRLSEAGHTVACHDESFKHQDELEAFADAYPQLIPMSEQEPAELIEAVTSAYGQVDVLVSNDIAAVEWRPIDKYAVEDYRGVVEALQIRPFALVNAVASQMKKRKSGHIIFITSAAPFGPWKELSTYSSARAGTSALANALSKELGEYNIPVFAIAPNYLHSEDSPYYYPSEPWKTNPEHVAHVRKVTALRRLGTQKELGELVTFLASGSCDYLTGQVFWLAGGFPVIERWPGMPE

SEQ ID NO: 629 - DNA, 768 bp, Artificial Sequence
  HHDH variant
  CDS (1)..(768)
atgagcaccgctattgtcaccaacgtcaaacattttggaggtatgggtagcgctctgaggctgagcgaagctggtcataccgtcgcttgccatgatgaaagctttaagcataaagatgaactggaagcttttgctgaaacctacccacagctgaaaccaatgagcgaacaggaaccagctgaactgattgaagctgtcaccagcgcttttggtcaggtcgatgtcctggtcagcaacgatatctttgctctagaatttcggccaatcgataaatacgctgtcgaggattacaggggtgctgtcgaagctctgcagatcaggccatttgctctagtgaatgctgtggcttcgcaaatgaagaagcgaaagtcggggcacatcatcttcatcacttcggctgccccgttcgggccatggaaggagctatcgacttactcttcggctcgagctgggactagtgcactagctaatgctctatcgaaggagctaggagagtacaatatcccggtgttcgctatcgggccgaattacctacactcggaggattcgccgtactattaccccactgagccgtggaagattaatccggagcacgtggctcacgtgaagaaggtgactgctctacaacgactagggactcaaaaagagttgggggaattggtggcatttttggcatctggctcttgtgattatttgactggtcaggtgttttggttggcaggcggctttcccgtcatagaacgttggcccggcatgcccgaataatga

SEQ ID NO: 630 - protein, 254 aa, Artificial Sequence; identical to SEQ ID NO: 200
  HHDH variant

SEQ ID NO: 631 - DNA, 768 bp, Artificial Sequence
  HHDH variant
  CDS (1)..(768)
atgagcaccgctattgtcaccaacgtcaaacattttggaggtatgggtagcgctctgaggctgagcgaagctggtcataccgtcgcttgccatgatgaaagctttaagcataaagatgaactggaagcttttgctgaaacctacccacagctgcgtccaatgagcgaacaggaaccagctgaactgattgaagctgtcaccagcgcttttggtcatgtcgatgtcctggtcagcaacgatatcgctgctgtggaatggcggccaatcgataaatacgctgtcgaggattacaggggtgctgtcgaagctctgcagatcaggccatttgctctagtgaatgctgtggcttcgcaaatgaagaagcgaaagtcggggcacatcatcttcatcacttcggctgccccgttcgggccatggaaggagctatcgacttactcttcggctcgagctgggactagtgcactagctaatgctctatcgaaggagctaggagagtacaatatcccggtgttcgctatcgctccgaattacctacactcggaggattcgccgtactattacccctctgagccgtggaagactaatccggagcacgtggctcacgtgcgtaaggtgactgctctacaacgactagggactcaaaaagagttgggggaattggtgacatttttggcatctggctcttgtgattatttgactggccaggtgttttggttggcaggcggctttcccgtcatcgaacgttggcccggcatgcccgaataatga

SEQ ID NO: 632 - protein, 254 aa, Artificial Sequence
  HHDH variant
MSTAIVTNVKHFGGMGSALRLSEAGHTVACHDESFKHKDELEAFAETYPQLRPMSEQEPAELIEAVTSAFGHVDVLVSNDIAAVEWRPIDKYAVEDYRGAVEALQIRPFALVNAVASQMKKRKSGHIIFITSAAPFGPWKELSTYSSARAGTSALANALSKELGEYNIPVFAIAPNYLHSEDSPYYYPSEPWKTNPEHVAHVRKVTALQRLGTQKELGELVTFLASGSCDYLTGQVFWLAGGFPVIERWPGMPE

SEQ ID NO: 633 - DNA, 768 bp, Artificial Sequence
  HHDH variant
  CDS (1)..(768)
atgagcaccgctattgtcaccaacgtcaaacattttggaggtatgggtagcgctctgaggctgagcgaagctggtcataccgtcgcttgccatgatgaaagctttaagcataaagatgaactggaagcttttgctgacacctacccacagctgataccaatgagcgaacaggaaccagctgaactgattgaagctgtcaccagcgcttttggtcaggtcgatgtcctggtcagcaacgatatcgctgctgtggaatggcggccaatcgataaatacgctgtcgaggattacaggggtgctgtcgaagctctgcagatcaggccatttgctctagtgaatgctgtggcttcgcaaatgaagaagcgaaagtcggggcacatcatcttcatcacttcggctgccccgttcgggccatggaaggagctatcgacttactcttcggctcgagctgggactagtgcactagctaatgctctatcgaaggagctaggagagtacaatatcccggtgttcgctatcgctccgaattacctacactcggaggattcgccgtactattacccctctgagccgtggaagacttctccggagcacgtggctcacgtgcgtaaggtgactgctctacaacgactagggactcaaaaagagttgggggaattggtggcatttttggcatctggctcttgtgattatttgactggccaggtgttttggttggcaggcggctttcccgtcatcgaacgttggcccggcatgcccgaataatga

SEQ ID NO: 634 - protein, 254 aa, Artificial Sequence
  HHDH variant
MSTAIVTNVKHFGGMGSALRLSEAGHTVACHDESFKHKDELEAFADTYPQLIPMSEQEPAELIEAVTSAFGQVDVLVSNDIAAVEWRPIDKYAVEDYRGAVEALQIRPFALVNAVASQMKKRKSGHIIFITSAAPFGPWKELSTYSSARAGTSALANALSKELGEYNIPVFAIAPNYLHSEDSPYYYPSEPWKTSPEHVAHVRKVTALQRLGTQKELGELVAFLASGSCDYLTGQVFWLAGGFPVIERWPGMPE

SEQ ID NO: 635 - DNA, 768 bp, Artificial Sequence
  HHDH variant
  CDS (1)..(768)
atgagcaccgctattgtcaccaacgtcaaacattttggaggtatgggtagcgctctgcgtctgagcgaagctggtcataccgtcgcttgccatgatgaaagctttaagcataaagatgaactggaagcttttgctgacgcctacccacagctgataccaatgagcgaacaggaaccagctgaactgattgaagctgtcaccagcgcttttggtcaggtcgatgtcctggtcagcaacgatatcattgctctagaatttcagccaatcgataaatacgctgtcgaggattacaggggtgttgtcgaagctctgcaggtccgcccatttgctctagtgaatgctgtggcttcgcaaatgaagaagcgaaagtcggggcacatcatcttcatcacttcggctgccccgttcgggccatggaaggagctatcgacttactcttcggctcgagctgggactagtgcactagctaatgctctatcgaaggagctaggagagtacaatatcccggtgttcgctatcgggccgaattacctacactcggaggattcgccgtactattaccccactgagccgtggaagactaatccggagcacgtggctcacgtgaagaaggtgactgctctacaacgactagggactcaaaaagagttgggggaattggtggcatttttggcatctggctcttgtgattatttgactggccaggtgttttggttggcaggcggctttcccgtcatagaacgttggcccggcatgcccgaataatga

SEQ ID NO: 636 - protein, 254 aa, Artificial Sequence
  HHDH variant
MSTAIVTNVKHFGGMGSALRLSEAGHTVACHDESFKHKDELEAFADAYPQLIPMSEQEPAELIEAVTSAFGQVDVLVSNDIIALEFQPIDKYAVEDYRGVVEALQVRPFALVNAVASQMKKRKSGHIIFITSAAPFGPWKELSTYSSARAGTSALANALSKELGEYNIPVFAIGPNYLHSEDSPYYYPTEPWKTNPEHVAHVKKVTALQRLGTQKELGELVAFLASGSCDYLTGQVFWLAGGFPVIERWPGMPE

SEQ ID NO: 637 - DNA, 768 bp, Artificial Sequence
  HHDH variant
  CDS (1)..(768)
atgagcgccgctattgtcacgaacgtcaaacattttggaggtatgggtagcgctctgaaactgagcgaagctggtcataccgtcgcttgccatgatgaaagctttaagcatcaggatgaactggaagcttttgctgacacctacccacagctgcgtccaatgagcgaacaggaaccagctgaactgattgaagctgtcaccagcgcttatggtcaggtcgatgtcctggtcagcaacgatatctatgctctagaatttcgtccaatcgataaatacgctgtcgaggattacaggggtgctgtcgaagctctgcagatcaggccatttgctctagtgaatgctgtggcttcgcaaatgaagaagcgaaagtcggggcacatcatcttcatcacttcggctgccccgttcgggccatggaaggagctatcgacttactcttcggctcgagctgggactagtgcactagctaatgctctatcgaaggagctaggagagtacaatatcccggtgttcgctatcgctccgaattacctacactcggaggattcgccgtactattacccctctgagccgtggaagacttctccggagcacgtggctcacgtgcgtaaggtgactgctctacaacgactagggactcaacgcgagttgggggaattggtggcatttttggcatctggctcttgtgattatttgactggccaggtgttttggttggcaggcggctttcccgtcctcgaacgttggcccggcatgcccgaataatga

SEQ ID NO: 638 - protein, 254 aa, Artificial Sequence
  HHDH variant
MSAAIVTNVKHFGGMGSALKLSEAGHTVACHDESFKHQDELEAFADTYPQLRPMSEQEPAELIEAVTSAYGQVDVLVSNDIYALEFRPIDKYAVEDYRGAVEALQIRPFALVNAVASQMKKRKSGHIIFITSAAPFGPWKELSTYSSARAGTSALANALSKELGEYNIPVFAIAPNYLHSEDSPYYYPSEPWKTSPEHVAHVRKVTALQRLGTQRELGELVAFLASGSCDYLTGQVFWLAGGFPVLERWPGMPE

SEQ ID NO: 639 - DNA, 774 bp, Artificial Sequence
  HHDH variant
  CDS (1)..(774)
atgagcaccgctatcgtcaccaacatcaaacattttggaggtatgggtagcgctctgaggctgagcgaagctggtcataccgtcgcttgccatgatgaaagctttaaacagaaagatgaactggaagcttttgctgaaacctacccacagctgcggccaatgagcgaacaggaaccagctgacatgatcgaagctgtcaccagcgcttacggtcaggtcgatgtcctggtcagcaacgatatctttgctccagaatttcagccaatcgataaatacgctgtcgaagattacaggggtgctgtcgaagctctgcagatcaggccatttgctctagtgaatgctgtggcttcgcaaatgaagaagcgaaagtcggggcacatcatcttcatcacttcggctactccgttcgggccatggaaggagctatcgacttacacttcggctcgagctggggcttgtactctagctaatgctctatcgaaggagctaggagagtacaatatcccggtgttcgctatcgggccgaattacctacactcggaggattcgccgtacttctacccgactgagccgtggaagactaatccggagcacgtggctcacgtgaagaaggtgactgctctacaacgactagggactcaaaaagagttgggggaattggtggcatttttggcatctggctcttgtgattatttgactggccaggtgttttggttggcaggcggctttcccatgatagaacgttggcccggcatgcccgaataatgaggatcc

SEQ ID NO: 640 - protein, 254 aa, Artificial Sequence
  HHDH variant
MSTAIVTNIKHFGGMGSALRLSEAGHTVACHDESFKQKDELEAFAETYPQLRPMSEQEPADMIEAVTSAYGQVDVLVSNDIFAPEFQPIDKYAVEDYRGAVEALQIRPFALVNAVASQMKKRKSGHIIFITSATPFGPWKELSTYTSARAGACTLANALSKELGEYNIPVFAIGPNYLHSEDSPYFYPTEPWKTNPEHVAHVKKVTALQRLGTQKELGELVAFLASGSCDYLTGQVFWLAGGFPMIERWPGMPE

SEQ ID NO: 641 - DNA, 774 bp, Artificial Sequence
  HHDH variant
  CDS (1)..(774)
atgagcaccgctatcgtcaccaacgtcaaacattttggaggtatgggtagcgctctgaggctgagcgaagctggtcataccgtcgcttgccatgatgaaagctttaaacagaaagatgaactggaagcttttgctgaaacctacccacagctgaaaccaatgagcgaacaggaaccagctgaactgatcgaagctgtcaccagcgcttacggtcaggtcgatgtcctggtcagcaacgatatctttgctccagaatttcagccaatcgataaatacgctgtccaggattacaggggtgctgtcgaagctctgcagatcaggccatttgctctagtgaatgctgtggcttcgcaaatgaagaagcgaaagtcggggcacatcatcttcatcacttcggctgctccgttcgggccatggaaggagctatcgacttacacttcggctcgagctggggcttgttccctagctaatgctctagctaaggagctaggagagtacaatatcccggtgttcgctatcgggccgaattacctacactcggaggattcgccgtacttctacccgactgagccgtggaagactaatccggagcacgtggctcacgtgaagaaggtgactgctctacgacgactagggactcaagaagagttgggggaattggtggcatttttggcatctggctcttgtgattatttgactggccaggtgttttggttggcaggcggctttcccatgatagaacgttggcccggcatgcccgaataatgaggatcc

SEQ ID NO: 642 - protein, 254 aa, Artificial Sequence
  HHDH variant
MSTAIVTNVKHFGGMGSALRLSEAGHTVACHDESFKQKDELEAFAETYPQLKPMSEQEPAELIEAVTSAYGQVDVLVSNDIFAPEFQPIDKYAVQDYRGAVEALQIRPFALVNAVASQMKKRKSGHIIFITSAAPFGPWKELSTYTSARAGACSLANALAKELGEYNIPVFAIGPNYLHSEDSPYFYPTEPWKTNPEHVAHVKKVTALRRLGTQEELGELVAFLASGSCDYLTGQVFWLAGGFPMIERWPGMPE

SEQ ID NO: 643 - DNA, 768 bp, Artificial Sequence
  HHDH variant
  CDS (1)..(768)
atgagcaccgctatcgtcaccaacgtcaaacattttggaggtatgggtagcgctctgaggctgagcgaagctggtcataccgtcgcttgccatgatgaaagctttaaacagaaagatgaactggaagcttttgctgaaacctacccacagctgaaaccaatgagcgaacaggaaccagctgaactgatcgaagctgtcaccagcgcttacggtcaggtcgatgtcctggtcagcaacgatatctttgctccagaatttcagccaatcgataaatacgctgtcgaagattacaggggtgctgtcgaagctctgcagatcaggccatttgctctagtgaatgctgtggcttcgcaaatgaagaagcgaaagtcggggcacatcatcttcatcacttcggctactccgttcgggccatggaaggagctatcgacttacacttcggctcgagctggggcttgtactctagctaatgctctatcgaaggagctaggagagtacaatatcccggtgttcgctatcgggccgaattacctacactcggaggattcgccgtacttctacccgactgagccgtggaagactaatccggagcacgtggctcacgtgaagaaggtgactgctctacaacgactagggactcaaaaagagttgggggaattggtggcatttttggcatctggctcttgtgattatttgactggccaggtgttttggttggcaggcggctttcccatgatagaacgttggcccggcatgcccgaataatga

SEQ ID NO: 644 - protein, 254 aa, Artificial Sequence; identical to SEQ ID NO: 2
  HHDH variant

SEQ ID NO: 645 - DNA, 774 bp, Artificial Sequence
  HHDH variant
  CDS (1)..(774)
atgagcaccgctatcgtcaccaacgtcaaacattttggaggtatgggtagcgctctgaggctgagcgaagctggtcataccgtcgcttgccatgatgaaagctttaaacagaaagatgatctggaagcttttgctgaaacctacccacagctgaaaccaatgagcgaacaggatccagctgacctgattgaagctgtcaccagcgcttacggtcaggtcgatgtcctggtcagcaacgatatctttgctccagaatttcagccaatcgataaatacgctgtcgaaaactacaggggtgctgtcgaagctctgcagatcaggccatttgctctagtgaatgctgtggcttcgcaaatgaagaaacgaaagtcggggcacatcatcttcatcacttcggctactccgttcgggccatggaaagagctatcgacttacacttcggctcgagctggggcttgtactctagctaatgctctatcgaaggagctaggagagtacaatatcccggtgttcgctatcgggccgaattacctacactcggaggattcgccgtacttctacccgactgagccgtggaagactaatccggagcacgtggctcacgtgaagaaggtgactgctctacaacgactagggactcaaaaagagttgggggaattggtggcattcctggcatctggctcttgtgattatttgactggccaggtgttttggttggcaggcggctttcccattatcgaacgttggcccggcatgcccgaataatgaggatcc

SEQ ID NO: 646 - protein, 254 aa, Artificial Sequence
  HHDH variant
MSTAIVTNVKHFGGMGSALRLSEAGHTVACHDESFKQKDDLEAFAETYPQLKPMSEQDPADLIEAVTSAYGQVDVLVSNDIFAPEFQPIDKYAVENYRGAVEALQIRPFALVNAVASQMKKRKSGHIIFITSATPFGPWKELSTYTSARAGACTLANALSKELGEYNIPVFAIGPNYLHSEDSPYFYPTEPWKTNPEHVAHVKKVTALQRLGTQKELGELVAFLASGSCDYLTGQVFWLAGGFPIIERWPGMPE

SEQ ID NO: 647 - DNA, 774 bp, Artificial Sequence
  HHDH variant
  CDS (1)..(774)
atgagcaccgctatcgtcactaacgtcaaacattttggtggtatgggtagcgctctgaggctgagcgaagctggtcataccgtcgcttgccatgatgaaagctttaaacagaaagatgaactggaagcttttgctgaaacctacccacagctgaaaccaatgagcgaacaggaaccagctgaactgatcgaagctgtcaccagcgcttacggtcaggtcgatgtcctggtcagcaacgatatctttgctccagaatttcagccaatcgataaatacgctgtcgaagattacaggggtgctgtcgaagctctgcagatcaggccatttgctctagtgaatgctgtggcttcgcaaatgaagaagcgaaagtcggggcacatcatcttcatcacttcggctactccgttcgggccgtggaaggagctatcgacttacacttcggctcgagctggggcttgtactctagctaatgctctatcgaaggagctaggagggtacaatatcccggtgttcgctatcgggccgaattacctacactcggaggattcgccgtacttctacccgactgagccgtggaagactaatccggagcacgtggctcacgtgaagaaggtgactgctctacaacgactagggactcaaaaagagttgggggaattggtggcatttttggcatctggctcttgtgattatttgactggccaggtgttttggttggcaggcggctttcccatgatagaacgttggcccggcatgcccgaataatgaggatcc

SEQ ID NO: 648 - protein, 254 aa, Artificial Sequence
  HHDH variant
MSTAIVTNVKHFGGMGSALRLSEAGHTVACHDESFKQKDELEAFAETYPQLKPMSEQEPAELIEAVTSAYGQVDVLVSNDIFAPEFQPIDKYAVEDYRGAVEALQIRPFALVNAVASQMKKRKSGHIIFITSATPFGPWKELSTYTSARAGACTLANALSKELGGYNIPVFAIGPNYLHSEDSPYFYPTEPWKTNPEHVAHVKKVTALQRLGTQKELGELVAFLASGSCDYLTGQVFWLAGGFPMIERWPGMPE

SEQ ID NO: 649 - DNA, 774 bp, Artificial Sequence
  HHDH variant
  CDS (1)..(774)
atgagcaccgctatcgtcactaacgtcaaacattttggtggtatgggtagcgctctgaggctgagcgaagctggtcataccgtcgcttgccatgatgaaagctttaaacagaaagatgaactggaagcttttgctgaaacctacccacagctgaaaccgatgcgtgaacaggaaccagctgaactgatcgaagctgtcaccagcgcttacggtcaggtcgatgtcctggtcagcaacgacatctttgctccagaatttcagccaatcgataaatacgctgtcgaagattacaggggtgctgtcgaagctctgcagatcaggccatttgctctagtgaatgctgtggcttcgcaaatgaagaagcgaaagtcggggcacatcatcttcatcacttcggctactccgttcgggccgtggaaggagctatcgacttacacttcggctcgagctggggcttgtactctagctaatgctctatcgaaggagctaggagagtacaatatcccggtgttcgctatcgggccgaattacctacactcggaggattcgccgtacttctacccgactgagccgtggaagactaatccggagcacgtggctcacgtgaagaaggtgactgctctacaacgactagggactcaaaaagagttgggggaattggtggcatttttggcatctggctcttgtgattatttgactggccaggtgttttggatggcaggcggctttcccatgatagaacgttggcccggcatgcccgaataatgaggatcc

SEQ ID NO: 650 - protein, 254 aa, Artificial Sequence; identical to SEQ ID NO: 582
  HHDH variant

SEQ ID NO: 651 - DNA, 768 bp, Artificial Sequence
  HHDH variant
  CDS (1)..(768)
atgagcaccgctattgtcaccaacgtcaaacattttggaggtatgggtagcgctctgaggctgagcgaagctggtcataccgtcgcttgccatgatgaaagctttaagcataaagatgaactggaagcttttgctgaaacctacccacagctgaaaccaatgagcgaacaggaaccagctgaactgattgaagctgtcaccagcgcttttggtcaggtcgatgtcctggtcagcaacgatatctttgctctagaatttcggccaatcgataaatacgctgtcgaggattacaggggtgctgtcgaagctctgcagatcaggccatttgctctagtgaatgctgtggcttcgcaaatgaagaagcgaaagtcggggcacatcatcttcatcacttcggctgccccgttcgggccatggaaggagctatcgacttactcttcggctcgagctggggctagtgcactagctaatgctctatcgaaggagctaggagagtacaatatcaccgtgtacgctatcgggccgaattacctacactcggaggattcgccgtactattaccccactgagccgtggaagattaatccggagcacgtggctcacgtgaagaaggtgactgctctacaacgactagggactcaaaaagagttgggggaattggtggcatttttggcatctggctcttgtgactatttgactggccaggtgttttggttggcaggcggctttcccgtcatagaacgttggcccggcatgcccggataatga

SEQ ID NO: 652 - protein, 254 aa, Artificial Sequence
  HHDH variant
MSTAIVTNVKHFGGMGSALRLSEAGHTVACHDESFKHKDELEAFAETYPQLKPMSEQEPAELIEAVTSAFGQVDVLVSNDIFALEFRPIDKYAVEDYRGAVEALQIRPFALVNAVASQMKKRKSGHIIFITSAAPFGPWKELSTYSSARAGASALANALSKELGEYNITVYAIGPNYLHSEDSPYYYPTEPWKINPEHVAHVKKVTALQRLGTQKELGELVAFLASGSCDYLTGQVFWLAGGFPVIERWPGMPG

SEQ ID NO: 653 - DNA, 768 bp, Artificial Sequence
  HHDH variant
  CDS (1)..(768)
atgagcaccgctattgtcaccaacgtcaaacattttggaggtatgggtagcgctctgaggctgagcgaagctggtcataccgtcgcttgccatgatgaaagctttaagcataaagatgaactggaagcttttgctgaaacctacccacagctgaaaccaatgagcgaacaggaaccagctgaactgattgaagctgtcaccagcgcttttggtcaggtcgatgtcctggtcagcaacgatatctttgctctagaatttcggccaatcgataaatacgctgtcgaggattacaggggtgctgtcgaagctctgcagatcaggccatttgctctagtgaatgctgtggcttcgcaaatgaagaagcgaaagtcggggcacatcatcttcatcacttcggctgccccgttcgggccatggaaggagctatcgacttactcttcggctcgagctggggctagtgcactagctaatgctctatcgaaggagctaggagagtacaatatcaccgtgtacgctatcgggccgaattacctacactcggaggattcgccgtactattaccccactgagccgtggaagattaatccggagcacgtggctcacgtgaagaaggtgactgctctacaacgactagggactcaaaaagagttgggggaattggtggcatttttggcatctggctcttgtgattatttgactggccaggtgttttggttggcaggcggctttcccgtcatagaacgttggcccggcatgcccgaataatga

SEQ ID NO: 654 - protein, 254 aa, Artificial Sequence
  HHDH variant
MSTAIVTNVKHFGGMGSALRLSEAGHTVACHDESFKHKDELEAFAETYPQLKPMSEQEPAELIEAVTSAFGQVDVLVSNDIFALEFRPIDKYAVEDYRGAVEALQIRPFALVNAVASQMKKRKSGHIIFITSAAPFGPWKELSTYSSARAGASALANALSKELGEYNITVYAIGPNYLHSEDSPYYYPTEPWKINPEHVAHVKKVTALQRLGTQKELGELVAFLASGSCDYLTGQVFWLAGGFPVIERWPGMPE

SEQ ID NO: 655 - DNA, 696 bp, Artificial Sequence
  HHDH variant
  CDS (1)..(696)
atgagcaccgctatcgtcaccaacgtcaaacattttggaggtatgggtagcgctctgaggctgagcgaagctggtcataccgtcgcttgccatgatgaaagctttaaacagaaagatgaactggaagcttttgctgaaacctacccacagctgaaaccaatgagcgaacaggaaccagctgaactgatcgaagctgtcaccagcgcttacggtcaggtcgatgtcctggtcagcaacgatatctttgctccagaatttcagccaatcgataaatacgctgtcgaagattacaggggtgctgtcgaagctctgcagatcaggccatttgctctagtgaatgctgtggcttcgcaaatgaagaagcgaaagtcggggcacatcatcttcatcacttcggctactccgttcgggccatggaaggagctatcgacttacacttcggctcgagctggggcatgtactctagctaatgctctatcgaaggagctaggagagtacaatatcccggtgttcgctatcgggccgcattttctaaactcggaggattcgccgtacttctacccgactgagccgtggaagactaatccggagcacgtggctcacgtgaagaaggtgactgctctacaacgactagggactcaaaaagagttgggggaattggtggcatttttggcatctggctcttgtgattatttg

SEQ ID NO: 656 - protein, 232 aa, Artificial Sequence
  HHDH variant
MSTAIVTNVKHFGGMGSALRLSEAGHTVACHDESFKQKDELEAFAETYPQLKPMSEQEPAELIEAVTSAYGQVDVLVSNDIFAPEFQPIDKYAVEDYRGAVEALQIRPFALVNAVASQMKKRKSGHIIFITSATPFGPWKELSTYTSARAGACTLANALSKELGEYNIPVFAIGPHFLNSEDSPYFYPTEPWKTNPEHVAHVKKVTALQRLGTQKELGELVAFLASGSCDYL

SEQ ID NO: 657 - DNA, 696 bp, Artificial Sequence
  HHDH variant
  CDS (1)..(696)
atgagcaccgctatcgtcaccaacgtcaaacattttggaggtatgggtagcgctctgaggctgagcgaagctggtcataccgtcgcttgccatgatgaaagctttaaacagaaagatgaactggaagcttttgctgaaacctacccacagctgaaaccaatgagcgaacaggaaccagctgaactgatcgaagctgtcaccagcgcttacggtcaggtcgatgtcctggtcagcaacgatatctttgctccagaatttcagccaatcgataaatacgctgtcgaagattacaggggtgctgtcgaagctctgcagatcaggccatttgctctagtgaatgctgtggcttcgcaaatgaagaagcgaaagtcggggcacatcatcttcatcacttcggctactccgttcgggccatggaaggagctatcgacttacacttcggctcgagctggggcttgtactctagctaatgctctatcgaaggagctaggagagtacaatatcccggtgttcgctatcgggccgaattttctacactcggaggattcgccgtacttctacccgactgagccgtggaagactaatccggagcacgtggctcacgtgaagaaggtgactgctctacaacgactagggactcaaaaagagttgggggaattggtggcatttttggcatctggctcttgtgattatttg

SEQ ID NO: 658 - protein, 232 aa, Artificial Sequence
  HHDH variant
MSTAIVTNVKHFGGMGSALRLSEAGHTVACHDESFKQKDELEAFAETYPQLKPMSEQEPAELIEAVTSAYGQVDVLVSNDIFAPEFQPIDKYAVEDYRGAVEALQIRPFALVNAVASQMKKRKSGHIIFITSATPFGPWKELSTYTSARAGACTLANALSKELGEYNIPVFAIGPNFLHSEDSPYFYPTEPWKTNPEHVAHVKKVTALQRLGTQKELGELVAFLASGSCDYL

SEQ ID NO: 659 - DNA, 696 bp, Artificial Sequence
  HHDH variant
  CDS (1)..(696)
atgagcaccgctatcgtcaccaacgtcaaacattttggaggtatgggtagcgctctgaggctgagcgaagctggtcataccgtcgcttgccatgatgaaagctttaaacagaaagatgaactggaagcttttgctgaaacctacccacagctgaaaccaatgagcgaacaggaaccagctgaactgatcgaagctgtcaccagcgcttacggtcaggtcgatgtcctggtcagcaacgatatctttgctccagaatttcagccaatcgataaatacgctgtcgaagattacaggggtgctgtcgaagctctgcagatcaggccatttgctctagtgaatgctgtggcttcgcaaatgaagaagcgaaagtcggggcacatcatcttcatcacttcggctactccgttcgggccatggaaggagctatcgacttacacttcggctcgagctggggcttgtactctagctaatgctctatcgaaggagctaggagagtacaatatcccggtgttcgctatcgggccgaattttctacagtcggaggattcgccgtacttctacccgactgagccgtggaagactaatccggagcacgtggctcacgtgaagaaggtgactgctctacaacgactagggactcaaaaagagttgggggaattggtggcatttttggcatctggctcttgtgattatttg

SEQ ID NO: 660 - protein, 232 aa, Artificial Sequence
  HHDH variant
MSTAIVTNVKHFGGMGSALRLSEAGHTVACHDESFKQKDELEAFAETYPQLKPMSEQEPAELIEAVTSAYGQVDVLVSNDIFAPEFQPIDKYAVEDYRGAVEALQIRPFALVNAVASQMKKRKSGHIIFITSATPFGPWKELSTYTSARAGACTLANALSKELGEYNIPVFAIGPNFLQSEDSPYFYPTEPWKTNPEHVAHVKKVTALQRLGTQKELGELVAFLASGSCDYL

SEQ ID NO: 661 - DNA, 696 bp, Artificial Sequence
  HHDH variant
  CDS (1)..(696)
atgagcaccgctatcgtcaccaacgtcaaacattttggaggtatgggtagcgctctgaggctgagcgaagctggtcataccgtcgcttgccatgatgaaagctttaaacagaaagatgaactggaagcttttgctgaaacctacccacagctgaaaccaatgagcgaacaggaaccagctgaactgatcgaagctgtcaccagcgcttacggtcaggtcgatgtcctggtcagcaacgatatctttgctccagaatttcagccaatcgataaatacgctgtcgaagattacaggggtgctgtcgaagctctgcagatcaggccatttgctctagtgaatgctgtggcttcgcaaatgaagaagcgaaagtcggggcacatcatcttcatcacttcggctactccgttcgggccatggaaggagctatcgacttacacttcggctcgagctggggcttgtactctagctaatgctctatcgaaggagctaggagagtacaatatcccggtgttcgctatcgggccgcattttctaaactcggaggattcgccgtacttctacccgactgagccgtggaagactaatccggagcacgtggctcacgtgaagaaggtgactgctctacaacgactagggactcaaaaagagttgggggaattggtggcatttttggcatctggctcttgtgattatttg

SEQ ID NO: 662 - protein, 232 aa, Artificial Sequence; identical to SEQ ID NO: 656
  HHDH variant

SEQ ID NO: 663 - DNA, 768 bp, Artificial Sequence
  HHDH variant
  CDS (1)..(768)
atgagcaccgctattgtcaccaacgtcaaacattttggaggtatgggtagcgctctgaggctgagcgaagctggtcataccgtcgcttgccatgatgaaagctttaagcataaagatgaactggaagcttttgctgaaacctacccacagctgaaaccaatgagcgaacaggaaccagctgaactgattgaagctgtcaccagcgcttttggtcaggtcgatgtcctggtcagcaacgatatctttgctctagaatttcggccaatcgataaatacgctgtcgaggattacaggggtgctgtcgaagctctgcagatcaggccatttgctctagtgaatgctgtggcttcgcaaatgaagaagcgaaagtcggggcacatcatcttcatcacttcggctgccccgttcgggccatggaaggagctatcgacttactcttcggctcgagctggggctagtgcactagctaatgctctatcgaaggagctaggagagtacaatatcccagtgttcgctatcgggccaaactttctacactcggaggattcgaagtactattaccccactgagccgtggaagattaatccggagcacgtggctcacgtgaagaaggtgactgctctacaacgactagggactcaaaaagagttgggggaattggtggcatttttggcatctggctcttgtgactatttgactggccaggtgttttggttggcaggcggctttcccgtcatagaacgttggcccggcatgcccgaataatga

SEQ ID NO: 664 - protein, 254 aa, Artificial Sequence
  HHDH variant
MSTAIVTNVKHFGGMGSALRLSEAGHTVACHDESFKHKDELEAFAETYPQLKPMSEQEPAELIEAVTSAFGQVDVLVSNDIFALEFRPIDKYAVEDYRGAVEALQIRPFALVNAVASQMKKRKSGHIIFITSAAPFGPWKELSTYSSARAGASALANALSKELGEYNIPVFAIGPNFLHSEDSKYYYPTEPWKINPEHVAHVKKVTALQRLGTQKELGELVAFLASGSCDYLTGQVFWLAGGFPVIERWPGMPE

SEQ ID NO: 665 - DNA, 774 bp, Artificial Sequence
  HHDH variant
  CDS (1)..(774)
atgagcaccgctattgtcaccaacgtcaaacattttggaggtatgggtagcgctctgcgtctgagcgaagctggtcataccgtcgcttgccatgatgaaagctttaagcatcaggatgaactagaagcttttgctgaaacctacccacagctgataccaatgagcgaacaggaaccagctgaactgatcgaagctgtcaccagcgctcttggtcatgtcgatgtcctggtcagcaacgatatcgcgcctgtggaatggcggccaatcgataaatacgctgtcgaggattacagggatactgtcgaagctctgcagatcaagccatttgctctagtgaatgctgtcgcttcgcaaatgaagaagcgaaagtcggggcacatcatcttcatcacttcggctgccccgttcgggccacgtaaggaggtctcgacttactcttcggctcgagctggggctagtgcactagctaatgctctatcgaaggagctaggagagtacaatatcccggtgttcgctatcgctccgcgttacctacacatcggggattcgccgtaccgctacccctctgagccgtggaagacttctccggagcacgtggctcacgtgcgtaaggtgactgctctacaacgactagggactcaaaaagagttgggggaattggtgacgtttttggcatctggctcttgtgattatttgactggccaggtgttttggttggcaggcggctttcccgtcatcgaacgttggcccggcatgcccgaataatgaggatcc

SEQ ID NO: 666 - protein, 254 aa, Artificial Sequence
  HHDH variant
MSTAIVTNVKHFGGMGSALRLSEAGHTVACHDESFKHQDELEAFAETYPQLIPMSEQEPAELIEAVTSALGHVDVLVSNDIAPVEWRPIDKYAVEDYRDTVEALQIKPFALVNAVASQMKKRKSGHIIFITSAAPFGPRKEVSTYSSARAGASALANALSKELGEYNIPVFAIAPRYLHIGDSPYRYPSEPWKTSPEHVAHVRKVTALQRLGTQKELGELVTFLASGSCDYLTGQVFWLAGGFPVIERWPGMPE

SEQ ID NO: 667 - DNA, 774 bp, Artificial Sequence
  HHDH variant
  CDS (1)..(774)
atgagcaccgctattgtcaccaacgtcaaacattttggaggtatgggtagcgctctgcgtctgagcgaagctggtcataccgtcgcttgccatgatgaaagctttaagcatcaggatgaactagaagcttttgctgaaacctacccacagctgataccaatgagcgaacaggaaccagctgaactgattgaagctgtcaccagcgctcttggtcatgtcgatgtcctggtcagcaacgatatcgcgcctgtggaatggcggccaatcgataaatacgctgtcgaggattacagggatactgtcgaagctctgcagatcaagccatttgctctagtgaatgctgtcgcttcgcaaatgaagaagcgaaagtcggggcacatcatcttcatcacttcggctggaccgttcgggccacgtaaggaggtctcgacttactcttcggctcgagctggggctagtgcactagctaatgctctatcgaaggagctaggagagtacaatatcccggtgttcgctatcgctccgcgttacctacacaccggggattcgccgtactggtacccctctgagccgtggaagacttctccggagcacgtggctcacgtgcgtaaggtgactgctctacaacgactagggactcaaaaagagttgggggaattggtgacgtttttggcatctggctcttgtgattatctgactggccaggtgttttggttggcaggcggctttcccgtcatcgaacgttggcccggcatgcccgaataatgaggatcc

SEQ ID NO: 668 - protein, 254 aa, Artificial Sequence
  HHDH variant
MSTAIVTNVKHFGGMGSALRLSEAGHTVACHDESFKHQDELEAFAETYPQLIPMSEQEPAELIEAVTSALGHVDVLVSNDIAPVEWRPIDKYAVEDYRDTVEALQIKPFALVNAVASQMKKRKSGHIIFITSAGPFGPRKEVSTYSSARAGASALANALSKELGEYNIPVFAIAPRYLHTGDSPYWYPSEPWKTSPEHVAHVRKVTALQRLGTQKELGELVTFLASGSCDYLTGQVFWLAGGFPVIERWPGMPE

SEQ ID NO: 669 - DNA, 774 bp, Artificial Sequence
  HHDH variant
  CDS (1)..(774)
atgagcaccgctattgtcaccaacgtcaaacattttggaggtatgggtagcgctctgcgtctgagcgaagctggtcataccgtcgcttgccatgatgaaagctttaagcatcaggatgaactagaagcttttgctgaaacctacccacagctgataccaatgagcgaacaggaaccagctgaactgattggagctgtcaccagcgctcttggtcatgtcgatgtcctggtcagcaacgatatcgcgcctgtggaatggcggccaatcgataaatacgctgtcgaggattacagggatactgtcgaagctctgcagatcaagccatttgctctagtgaatgctgtcgcttcgcaaatgaagaagcgaaagtcggggcacatcatcttcatcacttcggctgccccgttcgggccatggaaggaggtctcgacttactcttcggctcgagctggggctagtgcactagctaatgctctatcgaaggagctaggagagtacaatatcccggtgttcgctatcgctccgaattacctacacaccggggattcgccgtactattacccctctgagccgtggaagacttctccggagcacgtggctcacgtgcgtaaggtgactgctctacaacgactagggactcaaaaagagttgggggaattggtaacgtttttggcatctggctcttgtgattatttgactggccaggtgttttggttggcaggcggctttcccgtcatcgaacgttggcccggcatgcccgaataatgaggatcc

SEQ ID NO: 670 - protein, 254 aa, Artificial Sequence
  HHDH variant
MSTAIVTNVKHFGGMGSALRLSEAGHTVACHDESFKHQDELEAFAETYPQLIPMSEQEPAELIGAVTSALGHVDVLVSNDIAPVEWRPIDKYAVEDYRDTVEALQIKPFALVNAVASQMKKRKSGHIIFITSAAPFGPWKEVSTYSSARAGASALANALSKELGEYNIPVFAIAPNYLHTGDSPYYYPSEPWKTSPEHVAHVRKVTALQRLGTQKELGELVTFLASGSCDYLTGQVFWLAGGFPVIERWPGMPE

SEQ ID NO: 671 - DNA, 774 bp, Artificial Sequence
  HHDH variant
  CDS (1)..(774)
atgagcaccgctattgtcaccaacgtcaaacattttggaggtatgggtagcgctctgcgtctgagcgaagctggtcataccgtcgcttgccatgatgaaagctttaagcatcaggatgaactagaagcttttgctgaaacctacccacagctgataccaatgagcgaacaggaaccagttgaactgattgaagctgtcaccagcgctcttggtcatgtcgatgtcctggtcagcaacgatatcgcgcctgtggaatggcggccaatcgataaatacgctgtcgaggattacagggatactgtcgaagctctgcagatcaagccatttgctctagtgaatgctgtcgcttcgcaaatgaagaagcgaaagtcggggcacatcatcttcatcacttcggctgcaccgttcgggccatggaaggagctatcgacttactcttcggctcgagctggggctagtgcactagctaatgctctatcgaaggagctaggagagtacaatatcccggtgttcgctatcgctccgaattacctacacaccggggattcgccgtactattacccctctgagccgtggaagacttctccggagcacgtggctcacgtgcgtaaggtgactgctctacaacgactagggactcaaaaagagctgggggaattggtgacgtttttggcatctggctcttgtgattatttgactggccaggtgttttggttggcaggcggctttcccgtcatcgaacgttggcccggcatgcccgaataatgaggatcc

SEQ ID NO: 672 - protein, 254 aa, Artificial Sequence
  HHDH variant
MSTAIVTNVKHFGGMGSALRLSEAGHTVACHDESFKHQDELEAFAETYPQLIPMSEQEPVELIEAVTSALGHVDVLVSNDIAPVEWRPIDKYAVEDYRDTVEALQIKPFALVNAVASQMKKRKSGHIIFITSAAPFGPWKELSTYSSARAGASALANALSKELGEYNIPVFAIAPNYLHTGDSPYYYPSEPWKTSPEHVAHVRKVTALQRLGTQKELGELVTFLASGSCDYLTGQVFWLAGGFPVIERWPGMPE

SEQ ID NO: 673 - DNA, 774 bp, Artificial Sequence
  HHDH variant
  CDS (1)..(774)
atgaggaccgctattgtcaccaacgtcaaacattttggaggtatgggtagcgctctgcgtctgagcgaagctggtcataccgtcgcttgccatgatgaaagctttaagcatcaggatgaactagaagcttttgctgaaacctacccacagctgataccaatgagcggacaggaaccagctgaactgattgaagctgtcaccagcgcccttggtcatgtcgatgtcctggtcagcaacgatatcgcgcctgtggaatggcggccaatcgataaatacgctgtcgaggattacagggatactgtcgaagctctgcagatcaagccatttgctctagtgaatgctgtcgcttcgcaaatgaagaagcgaaagtcggggcacatcatcttcatcacttcggctgccccgttcgggccatggaaggagctatcgacttactcttcggctcgagctggggctagtgcactagctaatgctctatcgaaggagctaggagagtacaatatcccggtgttcgctatcgctccgcgttacctacacgacggggattcgccgtaccgctacccctctgagccgtggaagacttctccggagcacgtggctcacgtgcgtaaggtgactgctctacaacgactagggactcaaaaagagttgggggaattggtgacgtttttggcatctggctcttgtgattatttgactggccaggtgttttggttggcaggcggctttcccgtcatcgaacgttggtccggcatgcccgaataatgaggatcc

SEQ ID NO: 674 - protein, 254 aa, Artificial Sequence
  HHDH variant
MRTAIVTNVKHFGGMGSALRLSEAGHTVACHDESFKHQDELEAFAETYPQLIPMSGQEPAELIEAVTSALGHVDVLVSNDIAPVEWRPIDKYAVEDYRDTVEALQIKPFALVNAVASQMKKRKSGHIIFITSAAPFGPWKELSTYSSARAGASALANALSKELGEYNIPVFAIAPRYLHDGDSPYRYPSEPWKTSPEHVAHVRKVTALQRLGTQKELGELVTFLASGSCDYLTGQVFWLAGGFPVIERWSGMPE

SEQ ID NO: 675 - DNA, 768 bp, Artificial Sequence
  HHDH variant
  CDS (1)..(768)
atgagcaccgctattgtcaccaacgtcaaacattttggaggtatgggtagcgctctgaggctgagcgaagctggtcataccgtcgcttgccatgatgaaagctttaagcataaagatgaactggaagcttttgctgaaacctacccacagctgaaaccaatgagcgaacaggaaccagctgaactgattgaagctgtcaccagcgcttttggtcaggtcgatgtcctggtcagcaacgatatctttgctctagaatttcggccaatcgataaatacgctgtcgaggattacaggggtgctgtcgaagctctgcagatcaggccatttgctctagtgaatgctgtggcttcgcaaatgaagaagcgaaagtcggggcacatcatcttcatcacttcggctgccccgttcgggccatggaaggagctatcggcgtactcttcggctcgagctggggctagtgcactagctaatgctctatcgaaggagctaggagagtacaatatcccggtgttcgctatcgggccgaattacctacactcgattgattcgccgtactattaccccactgagccgtggaagattaatccggagcacgtggctcacgtgaagaaggtgactgctctacaacgactagggactcaaaaagagttgggggaattggtggcatttttggcatctggctcttgtgattatttgactggccaggtgttttggttggcaggcggctttcccgtcatagaacgttggcccggcatgcccgaataatga

SEQ ID NO: 676 - protein, 254 aa, Artificial Sequence
  HHDH variant
MSTAIVTNVKHFGGMGSALRLSEAGHTVACHDESFKHKDELEAFAETYPQLKPMSEQEPAELIEAVTSAFGQVDVLVSNDIFALEFRPIDKYAVEDYRGAVEALQIRPFALVNAVASQMKKRKSGHIIFITSAAPFGPWKELSAYSSARAGASALANALSKELGEYNIPVFAIGPNYLHSIDSPYYYPTEPWKINPEHVAHVKKVTALQRLGTQKELGELVAFLASGSCDYLTGQVFWLAGGFPVIERWPGMPE

SEQ ID NO: 677 - DNA, 768 bp, Artificial Sequence
  HHDH variant
  CDS (1)..(768)
atgagcaccgctattgtcaccaacgtcaaacattttggaggtatgggtagcgctctgaggctgagcgaagctggtcataccgtcgcttgccatgatgaaagctttaagcataaagatgaactggaagcttttgctgaaacctacccacagctgaaaccaatgagcgaacaggaaccagctgaactgattgaagctgtcaccagcgcttttggtcaggtcgatgtcctggtcagcaacgatatctttgctctagaatttcggccaatcgataaatacgctgtcgaggattacaggggtgctgtcgaagctctgcagatcaggccatttgctctagtgaatgctgtggcttcgcaaatgaagaagcgaaagtcggggcacattatcttcatcacttcggctgccccgttcgggccatggaaggagctatctgcgtactcttcgtctcgagctgggactagtgcactagctaatgctctatcgaaggagctaggagagtacaatatcccggtgttcgctatcgggccgaattacctacactcgattgattcgccgtactattaccccactgagccgtggaagattaatccggagcacgtggctcacgtgaagaaggtgactgctctacaacgactagggactcaaaaagagttgggggaattggtggcatttttggcatctggctcttgtgattatttgactggccaggtgttttggttggcaggcggctttcccgtcatagaacgttggcccggcatgcccgaataatga

SEQ ID NO: 678 - protein, 254 aa, Artificial Sequence
  HHDH variant
MSTAIVTNVKHFGGMGSALRLSEAGHTVACHDESFKHKDELEAFAETYPQLKPMSEQEPAELIEAVTSAFGQVDVLVSNDIFALEFRPIDKYAVEDYRGAVEALQIRPFALVNAVASQMKKRKSGHIIFITSAAPFGPWKELSAYSSSRAGTSALANALSKELGEYNIPVFAIGPNYLHSIDSPYYYPTEPWKINPEHVAHVKKVTALQRLGTQKELGELVAFLASGSCDYLTGQVFWLAGGFPVIERWPGMPE

SEQ ID NO: 679 - DNA, 768 bp, Artificial Sequence
  HHDH variant
  CDS (1)..(768)
atgagcaccgctattgtcaccaacgtcaaacattttggaggtatgggtagcgctctgaggctgagcgaagctggtcataccgtcgcttgccatgatgaaagctttaagcataaagatgaactggaagcttttgctgaaacctacccacagctgaaaccaatgagcgaacaggaaccagctgaactgattgaagctgtcaccagcgcttttggtcaggtcgatgtcctggtcagcaacgatatctttgctctagaatttcggccaatcgataaatacgctgtcgaggattacaggggtgctgtcgaagctctgcagatcaggccatttgctctagtgaatgctgtggcttcgcaaatgaagaagcgaaagtcggggcacatcatcttcatcacttcggctgccccgttcgggccatggaaggagctatcgacttactcttcggctcgagctggggctagtgcactagctaatgctctatcgaaggagctaggagagtacaatatcccggtgttcgctatcgggccgaattacctacactcggaggattcgaagtactattaccccactgagccgtggaagattaatccggagcacgtggctcacgtgaagaaggtgactgctctacaacgactagggactcaaaaagagttgggggaattggtggcatttttggcatctggctcttgtgattatttgactggccaggtgttttggttggacggcggctttcccgtcatagaacgttggcccggcatgcccgaataatga

SEQ ID NO: 680 - protein, 254 aa, Artificial Sequence
  HHDH variant
MSTAIVTNVKHFGGMGSALRLSEAGHTVACHDESFKHKDELEAFAETYPQLKPMSEQEPAELIEAVTSAFGQVDVLVSNDIFALEFRPIDKYAVEDYRGAVEALQIRPFALVNAVASQMKKRKSGHIIFITSAAPFGPWKELSTYSSARAGASALANALSKELGEYNIPVFAIGPNYLHSEDSKYYYPTEPWKINPEHVAHVKKVTALQRLGTQKELGELVAFLASGSCDYLTGQVFWLDGGFPVIERWPGMPE

SEQ ID NO: 681 - DNA, 768 bp, Artificial Sequence
  HHDH variant
  CDS (1)..(768)
atgagcaccgctattgtcaccaacgtcaaacattttggaggtatgggtagcgctctgaggctgagcgaagctggtcataccgtcgcttgccatgatgaaagctttaagcataaagatgaactggaagcttttgctgaaacctacccacagctgaaaccaatgagcgaacaggaaccagctgaactgattgaagctgtcaccagcgcttttggtcaggtcgatgtcctggtcagcaacgatatctttgctctagaatttcggccaatcgataaatacgctgtcgaggattacaggggtgctgtcgaagctctgcagatcaggccatttgctctagtgaatgctgtggcttcgcaaatgaagaagcgaaagtcggggcacatcatcttcatcacttcggctgccccgttcgggccatggaaggagctatcgacttactcttcggctcgagctggggctagtgcactagctaatgctctatcgaaggagctaggagagtacaatatcccggtgttcgctatcgggccgaattacctacactcggaggattcgaagtactattaccccactgagccgtggaagattaatccggagcacgtggctcacgtgaagaaggtgactgctctacaacgactagggactcaaaaagagttgggggaattggtggcatttttggcatctggctcttgtgattatttgactggccaggtgttttggttggcaggcggctttcccgtcatagaacgttggcccggcatgcccgaataatga

SEQ ID NO: 682 - protein, 254 aa, Artificial Sequence
  HHDH variant
MSTAIVTNVKHFGGMGSALRLSEAGHTVACHDESFKHKDELEAFAETYPQLKPMSEQEPAELIEAVTSAFGQVDVLVSNDIFALEFRPIDKYAVEDYRGAVEALQIRPFALVNAVASQMKKRKSGHIIFITSAAPFGPWKELSTYSSARAGASALANALSKELGEYNIPVFAIGPNYLHSEDSKYYYPTEPWKINPEHVAHVKKVTALQRLGTQKELGELVAFLASGSCDYLTGQVFWLAGGFPVIERWPGMPE

SEQ ID NO: 683 - DNA, 774 bp, Artificial Sequence
  HHDH variant
  CDS (1)..(774)
atgaccaccgctatcgtcaccaacgtcaaacattttggaggtatgggtagcgctctgaggctgagcgaagctggtcataccgtcgcttgccatgatgaaagctttaaacagaaagatgaactggaagcttttgctgaaacctacccacagctgaaaccaatgagcgaacaggaaccagctgaactgatcgaagctgtcaccagcgcttacgggcaggtcgatgtcctggtcagcaacgatatctttgctccagaatttcagccaatcgataaatacgctgtcgaagattacaggggtgctgtcgaagctctgcagatcaggccatttgctctagtgaatgctgtggcttcgcaaatgaagaagcgaaagtcggggcacatcatcttcatcacttcggctactccgttcgggccatggaaggagctatcgacttacgcttcggctcgagctggggcttgttccctagctaatgctctatcgaaggagctaggagagtacaatatcccggtgttcgctatcgggccgaattacctacactcggaggattcgccgtacttctacccgactgagccgtggaagactaatccggagcacgtggctcacgtgaagaaggtgactgctctacaacgactagggactcaaaaagagttgggggaattggtggcatttttggcatctggctcttgtgattatttgactggccaggtgctgtggttggcaggcggctttcccatgatagaacgttggcccggcatgcccgaataatgaggatcc

SEQ ID NO: 684 - protein, 254 aa, Artificial Sequence
  HHDH variant
MTTAIVTNVKHFGGMGSALRLSEAGHTVACHDESFKQKDELEAFAETYPQLKPMSEQEPAELIEAVTSAYGQVDVLVSNDIFAPEFQPIDKYAVEDYRGAVEALQIRPFALVNAVASQMKKRKSGHIIFITSATPFGPWKELSTYASARAGACSLANALSKELGEYNIPVFAIGPNYLHSEDSPYFYPTEPWKTNPEHVAHVKKVTALQRLGTQKELGELVAFLASGSCDYLTGQVLWLAGGFPMIERWPGMPE

SEQ ID NO: 685 - DNA, 774 bp, Artificial Sequence
  HHDH variant
  CDS (1)..(774)
atgagcaccgctatcgtcaccaacgtcaaacattttggaggtatgggtagcgctctgaggctgagcgaagctggtcataccgtcgcttgccatgatgaaagctttaaacagaaagatgaactggaagcttttgctgaaacctacccacagctgaaaccaatgagcgaacaggaaccagctgaactgatcgaagctgtcaccagcgcttacggtcaggtcgatgtcctggtcagcaacgatatctttgctccagaactgcagccaatcgataaatacgctgtcgaagattacaggggtgctgtcgaagctctgcagatcaggccatttgctctagtgaatgctgtggcttcgcaaatgaagaagcgaaagtcggggcacatcatcttcatcacttcggctactccgttcgggccatggaaggagctatcgacttacacttcggctcgagctggggcttgtactctagctaatgctctatcgaaggagctaggagagtacaatatcccggtgttcgctatcgggccgaattacctacactcggaggattcgccgtacttctacccgactgagccgtggaagactaatccggagcacgtggctcacgtgaagaaggtgactgctctacaacgactagggactcaaaaagagttgggggaattggtggcatttttggcatctggctcttgtgattatttgactggccaggtgttttggttggcaggcggctttcccatgatagaacgttggcccggcatgcccgaataatgaggatcc

SEQ ID NO: 686 - protein, 254 aa, Artificial Sequence
  HHDH variant
MSTAIVTNVKHFGGMGSALRLSEAGHTVACHDESFKQKDELEAFAETYPQLKPMSEQEPAELIEAVTSAYGQVDVLVSNDIFAPELQPIDKYAVEDYRGAVEALQIRPFALVNAVASQMKKRKSGHIIFITSATPFGPWKELSTYTSARAGACTLANALSKELGEYNIPVFAIGPNYLHSEDSPYFYPTEPWKTNPEHVAHVKKVTALQRLGTQKELGELVAFLASGSCDYLTGQVFWLAGGFPMIERWPGMPE

SEQ ID NO: 687 - DNA, 774 bp, Artificial Sequence
  HHDH variant
  CDS (1)..(774)
atgagcaccgctatcgtcaccaacgtcaaacattttggaggtatgggtagcgctctgaggctgagcgaagctggtcataccgtcgcttgccatgatgaaagctttaaacagaaagatgaactggaagcttttgctgaaacctacccacagctgaaaccaatgagcgaacaggaaccagctgaactgatcgaagctgtcaccagcgcttacggtcaggtcgatgtcctggtcagcaacgatatctttgctccagaactgcatccaatcgataaatacgctgtcgaagattacaggggtgctgtcgaagctctgcagatcaggccatttgctctagtgaatgctgtggcttcgcaaatgaagaagcgaaagtcggggcacatcatcttcatcacttcggctactccgttcgggccatggaaggagctatcgacttacacttcggctcgagctggggcttgtactctagctaatgctctatcgaaggagctaggagagtacaatatcccggtgttcgctatcgggccgaattacctacactcggaggattcgccgtacttctacccgactgagccgtggaagactaatccggagcacgtggctcacgtgaagaaggtgactgctctacaacgactagggactcaaaaagagttgggggaattggtggcatttttggcatctggctcttgtgattatttgactggccaggtgttttggttggcaggcggctttcccatgatagaacgttggcccggcatgcccgaataatgaggatcc

SEQ ID NO: 688 - protein, 254 aa, Artificial Sequence
  HHDH variant
MSTAIVTNVKHFGGMGSALRLSEAGHTVACHDESFKQKDELEAFAETYPQLKPMSEQEPAELIEAVTSAYGQVDVLVSNDIFAPELHPIDKYAVEDYRGAVEALQIRPFALVNAVASQMKKRKSGHIIFITSATPFGPWKELSTYTSARAGACTLANALSKELGEYNIPVFAIGPNYLHSEDSPYFYPTEPWKTNPEHVAHVKKVTALQRLGTQKELGELVAFLASGSCDYLTGQVFWLAGGFPMIERWPGMPE

SEQ ID NO: 689 - DNA, 774 bp, Artificial Sequence
  HHDH variant
  CDS (1)..(774)
atgagcaccgctatcgtcaccaacgtcaaacattttggaggtatgggtagcgctctgaggctgagcgaagctggtcataccgtcgcttgccatgatgaaagctttaaacagaaagatgaactggaagcttttgctgaaacctacccacagctgaaaccaatgagcgaacaggaaccagctgaactgatcgaagctgtcaccagcgcttttggtcaggtcgatgtcctggtcagcaacgatatctttgctccagaatttcagccaatcgataaatacgctgtcgaagattacaggggtgctgtcgaagctctgcagatcaggccatttgctctagtgaatgctgtggcttcgcaaatgaagaagcgaaagtcggggcacatcatcttcatcacttcggctgccccgttcgggccatggaaggagctatcgacttacacttcggctcgagctggggctagttctctagctaatgctctatcgaaggagctaggagagtacaatatcccggtgttcgctatcgggccgaattacctacactcggaggattcgccgtacttctacccgactgagccgtggaagactaatccggagcacgtggctcacgtgaagaaggtgactgctctacaacgactagggactcaaaaagagttgggggaattggtggcatttttggcatctggctcttgtgattatttgactggccaggtgttttggttggcaggcggctttcccatgatagaacgttggcccggcatgcccgaataatgaggatcc

SEQ ID NO: 690 - protein, 254 aa, Artificial Sequence
  HHDH variant
MSTAIVTNVKHFGGMGSALRLSEAGHTVACHDESFKQKDELEAFAETYPQLKPMSEQEPAELIEAVTSAFGQVDVLVSNDIFAPEFQPIDKYAVEDYRGAVEALQIRPFALVNAVASQMKKRKSGHIIFITSAAPFGPWKELSTYTSARAGASSLANALSKELGEYNIPVFAIGPNYLHSEDSPYFYPTEPWKTNPEHVAHVKKVTALQRLGTQKELGELVAFLASGSCDYLTGQVFWLAGGFPMIERWPGMPE

SEQ ID NO: 691 - DNA, 774 bp, Artificial Sequence
  HHDH variant
  CDS (1)..(774)
atgagcaccgctatcgtcaccaacgtcaaacattttggaggtatgggtagcgctctgaggctgagtgaagctggtcataccgtcgcttgccatgatgaaagctttaaacagaaagatgaactggaagcttttgctgaaacctacccacagctgaaaccaatgagcgaacaggaaccagctgaactgatcgaagctgtcaccagcgcttacggtcaggtcgatgtcctggtcagcaacgatatctttgctccagaactgcagccaatcgataaatacgctgtcgaagattacaggggtgctgtcgaagctctgcagatcaggccatttgctgttgtgaatgctgtggcttcgcaaatgaagaagcgaaagtcggggcacatcatcttcatcacttcggctactccgctggggccatggaaggagctatcgacttacacttcggctcgagctggggcttgtactctagctaatgctctatcgaaggagctaggagagtacaatatcccggtgttcgctatcgggccgaattacctacactcggaggattcgccgtacttctacccgactgagccgtggaagactaatccggagcacgtggctcacgtgaagaaggtgactgctctacaacgactagggactcaaaaagagttgggggaattggtggcatttttggcatctggctcttgtgattatttgactggccaggtgttttggttggcaggcggctttcccatgatagaacgttggcccggcatgcccgaataatgaggatcc

SEQ ID NO: 692 - protein, 254 aa, Artificial Sequence
  HHDH variant
MSTAIVTNVKHFGGMGSALRLSEAGHTVACHDESFKQKDELEAFAETYPQLKPMSEQEPAELIEAVTSAYGQVDVLVSNDIFAPELQPIDKYAVEDYRGAVEALQIRPFAVVNAVASQMKKRKSGHIIFITSATPLGPWKELSTYTSARAGACTLANALSKELGEYNIPVFAIGPNYLHSEDSPYFYPTEPWKTNPEHVAHVKKVTALQRLGTQKELGELVAFLASGSCDYLTGQVFWLAGGFPMIERWPGMPE

SEQ ID NO: 693 - DNA, 774 bp, Artificial Sequence
  HHDH variant
  CDS (1)..(774)
atgagcaccgctatcgtcaccaacgtcaaacattttggaggtatgggtagcgctctgaggctgagcgaagctggtcataccgtcgcttgccatgatgaaagctttaaacagaaagatgaactggaagcttttgctgaaacctacccacagctgaaaccaatgagcgaacaggaaccagctgaactgatcgaagctgtcaccagcgcttacggtcaggtcgatgtcctggtcagcaacgatatctttgctccagaatttcagccaatcgataaatacgctgtcgaagattacaggggtgctgtcgaagctctgcagatcaggccatttgctctagtgaatgctgtggcttcgcaaatgaagaagcgaaagtcggggcacatcatcttcatcacttcggctactccgctggggccatggaaggagctatcgacttacacttcggctcgagctggggcttgtactctggctaatgctctatcgaaggagctaggagagtacaatatcccggtgttcgctatcgggccgaattacctacactcggaggattcgccgtacttctacccgactgagccgtggaagactaatccggagaacgtggctcacgtgaagaaggtgactgctctacaacgactagggactcaaaaagagttgggggaattggtggcatttttggcatctggctcttgtgattatttgactggccaggtgttttggttggcaggcggctttcccatgatagaacgttggcccggcatgcccgaataatgaggatcc

SEQ ID NO: 694 - protein, 254 aa, Artificial Sequence
  HHDH variant
MSTAIVTNVKHFGGMGSALRLSEAGHTVACHDESFKQKDELEAFAETYPQLKPMSEQEPAELIEAVTSAYGQVDVLVSNDIFAPEFQPIDKYAVEDYRGAVEALQIRPFALVNAVASQMKKRKSGHIIFITSATPLGPWKELSTYTSARAGACTLANALSKELGEYNIPVFAIGPNYLHSEDSPYFYPTEPWKTNPENVAHVKKVTALQRLGTQKELGELVAFLASGSCDYLTGQVFWLAGGFPMIERWPGMPE

SEQ ID NO: 695 - DNA, 774 bp, Artificial Sequence
  HHDH variant
  CDS (1)..(774)
atgagcaccgctatcgtcaccaacgtcaaacattttggaggtatgggtagcgctctgaggctgagcgaagctggtcataccgtcgcttgccatgatgaaagctttaaacagaaagatgaagtcgaagcttttgctgaaacctacccacagctgaaaccaatgagcgaacaggaaccagctgaactgatcgaagctgtcaccagcgcttacggtcaggtcgatgtcctggtcagcaacgatatctttgctccagaactgcagccaatcgataaatacgctgtcgaagattacaggggtgctgtcgaagctctgcagatcaggccatttgctctagtgaatgctgtggcttcgcaaatgaagaagcgaaagtcggggcacatcatcttcatcacttcggctactccgctggggccatggaaggagctatcgacttacacttcggctcgagctggggcttgtactctagctaatgctctatcgaaggagctaggagagtacaatatcccggtgttcgctatcgggccgaattacctacactcggaggattcgccgtacttctacccgactgagccgtggaagactaatccggagaacgtggctcacgtgaagaaggtgactgctctacaacgactagggactcaaaaagagttgggggaattggtggcatttttggcatctggctcttgtgattatttgactggccagctgttttggttggcaggcggctttcccatgatagaacgttggcccggcatgcccgaataatgaggatcc

SEQ ID NO: 696 - protein, 254 aa, Artificial Sequence
  HHDH variant
MSTAIVTNVKHFGGMGSALRLSEAGHTVACHDESFKQKDEVEAFAETYPQLKPMSEQEPAELIEAVTSAYGQVDVLVSNDIFAPELQPIDKYAVEDYRGAVEALQIRPFALVNAVASQMKKRKSGHIIFITSATPLGPWKELSTYTSARAGACTLANALSKELGEYNIPVFAIGPNYLHSEDSPYFYPTEPWKTNPENVAHVKKVTALQRLGTQKELGELVAFLASGSCDYLTGQLFWLAGGFPMIERWPGMPE

SEQ ID NO: 697 - DNA, 774 bp, Artificial Sequence
  HHDH variant
  CDS (1)..(774)
atgagcaccgctatcgtcaccaacgtcaaacattttggaggtatgggtagcgctctgaggctgagcgaagctggtcataccgtcgcttgccatgatgaaagctttaaacagaaagatgaagtcgaagcttttgctgaaacctacccacagctgaaaccaatgagcgaacaggaaccagctgaactgatcgaagctgtcaccagcgcttacggtcaggtcgatgtcctggtcagcaacgatatctttgctccagaatttcagccaatcgataaatacgctgtcgaagattacaggggtgctgtcgaagctctgcagatcaggccatttgctctagtgaatgctgtggcttcgcaaatgaagaagcgaaagtcggggcacatcatcttcatcacttcggctactccgctggggccatggaaggagctatcgacttacacttcggctcgagctggggcttgtactctagctaatgctctatcgaaggagctaggagagtacaatatcccggtgttcgctatcgggccgaattacctacactcggaggattcgccgtacttctacccgactgagccgtggaagactaatccggggaacgtggctcacgtgaagaaggtgactgctctacaacgactagggactcaaaaagagttgggggaattggtggcatttttggcatctggctcttgtgattatttgactggccaggtgttttggttggcaggcggctttcccatgatagaacgttggcccggcatgcccgaataatgaggatcc

SEQ ID NO: 698 - protein, 254 aa, Artificial Sequence
  HHDH variant
MSTAIVTNVKHFGGMGSALRLSEAGHTVACHDESFKQKDEVEAFAETYPQLKPMSEQEPAELIEAVTSAYGQVDVLVSNDIFAPEFQPIDKYAVEDYRGAVEALQIRPFALVNAVASQMKKRKSGHIIFITSATPLGPWKELSTYTSARAGACTLANALSKELGEYNIPVFAIGPNYLHSEDSPYFYPTEPWKTNPGNVAHVKKVTALQRLGTQKELGELVAFLASGSCDYLTGQVFWLAGGFPMIERWPGMPE

SEQ ID NO: 699 - DNA, 774 bp, Artificial Sequence
  HHDH variant
  CDS (1)..(774)
atgagcaccgctatcgtcaccaacgtcaaacattttggaggtatgggtagcgctctgaggctgagcgaagctggtcataccgtcgcttgccatgatgaaagctttaaacagaaagatgaagtcgaagcttttgctgaaacctacccacagctgaaaccaatgagcgaacaggaaccagctgaactgatcgaagctgtcaccagcgcttacggtcaggtcgatgtcctggtcagcaacgatatctttgctccagaatttcgtccaatcgataaatacgctgtcgaagattacaggggtgctgtcgaagctctgcagatcaggccatttgctctagtgaatgctgtggcttcgcaaatgaagaagcgaaagttggggcacatcatcttcatcacttcggctactccgttcgggccatggaaggagctatcgacttacacttcggctcgagctggggcttgtactctagctaatgctctatcgaaggagctaggagagtacaatatcccggtgttcgctatcgggccgaattacctacactcggaggattcgccgtacttctacccgactgagccgtggaagactaatccggagaacgtggctcacgtgaagaaggtgactgctctacaacgactagggactcaaaaagagttgggggaattggtggcatttttggcatctggctcttgtgattatttgactggccaggtgctgtggttggcaggcggctttcccatgatagaacgttggcccggcatgcccgaataatgaggatcc

SEQ ID NO: 700 - protein, 254 aa, Artificial Sequence
  HHDH variant
MSTAIVTNVKHFGGMGSALRLSEAGHTVACHDESFKQKDEVEAFAETYPQLKPMSEQEPAELIEAVTSAYGQVDVLVSNDIFAPEFRPIDKYAVEDYRGAVEALQIRPFALVNAVASQMKKRKLGHIIFITSATPFGPWKELSTYTSARAGACTLANALSKELGEYNIPVFAIGPNYLHSEDSPYFYPTEPWKTNPENVAHVKKVTALQRLGTQKELGELVAFLASGSCDYLTGQVLWLAGGFPMIERWPGMPE

SEQ ID NO: 701 - DNA, 768 bp, Artificial Sequence
  HHDH variant
  CDS (1)..(768)
atgagcaccgctatcgtcaccaacgtcaaacattttggtggtatgggtagcgctctgaggctgagcgaagctggtcataccgtcgcttgccatgatgaaagctttaaacagaaagatgaactggaagcttttgctgaaacctacccacagctgaaaccaatgagcgaacaggaaccagctgaactgatcgaagctgtcaccagcgcttacggtcaggtcgatgtcctggtcagcaacgatatctttgctccaaaatttcagccaatcgataaatacgctgtcgaagattacaggggtgctgtcgaagctctgcagatcaggccatttgctctagggaatgctggggcttcgcaaatgaagaaccaaaagacggtgcacatcatcttcatcacttcggctactccgttcgcatcgtggaaggagctatcgactcacacttctgctcgagctgggggttgtactctaactaatgctctatcgaaggagctaggggagtacaatatgccggagctagctatcgaggcgaattacctacactcgggggattcatcggacttctacacgactgagccgaggaagactaatccggagaacgtgcttcacctgaagaaggtgactggtctacaacgactagggactcaaaaagagctgggggaattggtggcatttttggaatcaggctcttgtgattatttgactggccaggtgctttgcttgccaggcggctttcccctgatagaacgttggcccggcatgcccgaataatga

SEQ ID NO: 702 - protein, 254 aa, Artificial Sequence
  HHDH variant
MSTAIVTNVKHFGGMGSALRLSEAGHTVACHDESFKQKDELEAFAETYPQLKPMSEQEPAELIEAVTSAYGQVDVLVSNDIFAPKFQPIDKYAVEDYRGAVEALQIRPFALGNAGASQMKNQKTVHIIFITSATPFASWKELSTHTSARAGGCTLTNALSKELGEYNMPELAIEANYLHSGDSSDFYTTEPRKTNPENVLHLKKVTGLQRLGTQKELGELVAFLESGSCDYLTGQVLCLPGGFPLIERWPGMPE

SEQ ID NO: 703 - DNA, 774 bp, Artificial Sequence
  HHDH variant
  CDS (1)..(774)
atgagcaccgctatcgtcactaacgtcaaacattttggtggtatgggtagcgctctgaggctgagcgaagctggtcataccgtcgcttgccatgatgaaagctttaaacagaaagatgaactggaagcttttgctgaaacctacccacagctgaaaccaatgagcgaacaggaaccagctgaactgatcgaagctgtcaccagcgcttacggtcaggtcgatgtcctggtcagcaacgatatctttgctccagaatttcagccaatcgataaatacgctgtcgaagattacaggggtgctgtcgaagctctgcagatcaggccatttgctctagtgaatgctgtggcttcgcaaatgaagaagcgaaagtcggggcacatcatcttcatcacttcggctactccgttcgggccgtggaaggagctatcgacttacacttcggctcgagctggggcttgtactctagctaatgctctatcgaaggagctaggagagtacaatatcccggtgttcgctatcgggccgaattacctacactcggaggattcgccgtacttctacccgactgagccgtggaagactaatccggagaacgtggctcacgtgaagaaggtgactgctctacaacgactagggactcaaaaagagttgggggaattggtggcatttttggcatctggctcttgtgattatttgactggccaggtgttttggttggcaggcggctttcccatgatagaacgttggcccggcatgcccgaataatgaggatcc

SEQ ID NO: 704 - protein, 254 aa, Artificial Sequence
  HHDH variant
MSTAIVTNVKHFGGMGSALRLSEAGHTVACHDESFKQKDELEAFAETYPQLKPMSEQEPAELIEAVTSAYGQVDVLVSNDIFAPEFQPIDKYAVEDYRGAVEALQIRPFALVNAVASQMKKRKSGHIIFITSATPFGPWKELSTYTSARAGACTLANALSKELGEYNIPVFAIGPNYLHSEDSPYFYPTEPWKTNPENVAHVKKVTALQRLGTQKELGELVAFLASGSCDYLTGQVFWLAGGFPMIERWPGMPE

SEQ ID NO: 705 - DNA, 774 bp, Artificial Sequence
  HHDH variant
  CDS (1)..(774)
atgagcaccgctatcgtcaccaacgtcaaacatttcggaggtatgggtagcgctctgaggctgagcgaagctggtcataccgtcgcttgccatgatgaaagctttaaacacaaagatgatctggaagcttttgctgaaacctacccacagctgaaaccaatgagcgaacaggaaccagccgaactgatcgaagctgtcaccagcgcttacggtcaggtcgatgtcctggtcagcaacgatatctttgctccagaatttcagccaatcgataaatacgctgtccaggattacaggggtgctgtcgaagctctgcagatcaggccatttgctctagtgaatgctgtggcttcgcaaatgaagaagcgaaagtcggggcacatcatcttcatcacttcgtctactccgttcgggccatggaaggagctatcgacttacacttcggctcgagctggggcttgtactctagctaatgctctatcgaaggagctaggagagtacaatatcccggtgttcgctatcgggccgaattacctacactcggaggattcgccgtacttctacccgagcgagccgtggaagactaatccggagcacatggctcacgtgaagaaggtgactgctctacaacgactagggactcaaaaagagttgggggaattggtggcatttttggcatctggctcttgtgattatttgactggccagatgttttggttggcaggcggctttcccatgatagaacgttggcccggcatgcccgaataatgaggatcc

SEQ ID NO: 706 - protein, 254 aa, Artificial Sequence
  HHDH variant
MSTAIVTNVKHFGGMGSALRLSEAGHTVACHDESFKHKDDLEAFAETYPQLKPMSEQEPAELIEAVTSAYGQVDVLVSNDIFAPEFQPIDKYAVQDYRGAVEALQIRPFALVNAVASQMKKRKSGHIIFITSSTPFGPWKELSTYTSARAGACTLANALSKELGEYNIPVFAIGPNYLHSEDSPYFYPSEPWKTNPEHMAHVKKVTALQRLGTQKELGELVAFLASGSCDYLTGQMFWLAGGFPMIERWPGMPE

SEQ ID NO: 707 - DNA, 774 bp, Artificial Sequence
  HHDH variant
  CDS (1)..(774)
atgagcaccgctatcgtcaccaatgtcaaacattttggaggtatgggtagcgctctgaggctgagcgaagctggtcataccgtcgcttgccatgatgaaagctttaaacacaaagatgaactggaagcttttgctgaaacctacccacagctgaaaccaatgagcgaacaggaaccagctgaactgatcgaagctgtcaccagcgcttacggtcaggtcgatgtcctggtcagcaacgatatctttgctccagaatttcagccaatcgacaaatacgctgtcgaagattacaggggtgctgtcgaagctctgcagatcaggccatttgctctagtgaatgctgtggcttcgcaaatgaagaaacgaaagtcggggcacatcatcttcatcacttcggctactccgttcgggccacggaaagagctatcgacttacacttcggctcgggctggggcttgtactctagctaatgctctatcgaaggagctaggagagtacaatatcccggtgttcgctatcgggccgaattacctacactcggaggattcgccgtacttctacccgactgagccgtggaagactaatccggagcacatggctcacgtgaagaaggtgactgctctacaacgactagggactcaaaaagagttgggggaattggtggcatttttggcatctggctcttgtgattatttgactggccaggtgttttggttggcaggcggctttcccctaatagaacgttggcccggcatgcccgaataatgaggatcc

SEQ ID NO: 708 - protein, 254 aa, Artificial Sequence
  HHDH variant
MSTAIVTNVKHFGGMGSALRLSEAGHTVACHDESFKHKDELEAFAETYPQLKPMSEQEPAELIEAVTSAYGQVDVLVSNDIFAPEFQPIDKYAVEDYRGAVEALQIRPFALVNAVASQMKKRKSGHIIFITSATPFGPRKELSTYTSARAGACTLANALSKELGEYNIPVFAIGPNYLHSEDSPYFYPTEPWKTNPEHMAHVKKVTALQRLGTQKELGELVAFLASGSCDYLTGQVFWLAGGFPLIERWPGMPE

SEQ ID NO: 709 - DNA, 774 bp, Artificial Sequence
  HHDH variant
  CDS (1)..(774)
atgagcaccgctatcgtcactaacgtcaaacattttggtggtatgggtagcgctctgaggctgagcgaagctggtcataccgtcgcttgccatgatgaaagctttaaacagaaagatgaactggaagcttttgctgaaacctacccacagctgaaaccaatgagcgaacaggaaccagctgaactgatcgaagctgtcaccagcgcttacggtcaggtcgatgtcctggtcagcaacgatatctttgctccagaatttcagccaatcgataaatacgctgtcgaagattacaggggtgctgtcgaagctctgcagatcaggccatttgctctagtgaatgctgtggcttcgcaaatgaagaagcgaaagtcggggcacatcatcttcatcacttcggctactccgttcgggccgtggaaggagctatcgacttacacttcggctcgagctggggcttgtactctagctaatgctctatcgaaggagctaggagagtacaatatcccggtgttcgctatcgggccgaattacctacactcggaggattcgccgtacttctacccgactgagccgtggaagactaatccggagcacatggctcacgtgaagaaggtgactgctctacaacgactagggactcaaaaagagttgggggaattggtggcatttttggcatctggctcttgtgattatttgactggccaggtgttttggttggcaggcggctttcccatgatagaacgttggcccggcatgcccgaataatgaggatcc

SEQ ID NO: 710 - protein, 254 aa, Artificial Sequence; identical to SEQ ID NO: 24
  HHDH variant

SEQ ID NO: 711 - DNA, 774 bp, Artificial Sequence
  HHDH variant
  CDS (1)..(774)
atgagcaccgctatcgtcactaacgtcaaacattttggtggtatgggtagcgctctgaggctgagcgaagctggtcataccgtcgcttgccatgatgaaagctttaaacagaaagatgaactggaagcttttgctgaaacctacccacagctgaaaccaatgagcgaacaggaaccagctgaactgatcgaagctgtcaccagcgcttacggtcaggtcgatgtcctggtcagcaacgatatctttgctccagaatttcagccaatcgataaatacgctgtcgaagattacaggggtgctgtcgaagctctgcagatcaggccatttgctctagtgaatgctgtggcttcgcaaatgaagaagcgaaagtcggggcacatcatcttcatcacttcggctactccgttcgggccgtggaaggagctatcgacttacacttcggctcgagctggggcttgtactctagctaatgctctatcgaaggagctgggtaagtacaatatcccggtgttcgctatcgggccgaattacctacactcggaggattcgccgtacttctacccgactgagccgtggaagactaatccggagcacatggctcacgtgaagaaggtgactgctctacaacgactagggactcaaaaagagttgggggaattggtggcatttttggcatctggctcttgtgattatttgactggccaggtgttttggttggcaggcggctttcccatgatagaacgttggcccggcatgcccgaataatgaggatcc

SEQ ID NO: 712 - protein, 254 aa, Artificial Sequence
  HHDH variant
MSTAIVTNVKHFGGMGSALRLSEAGHTVACHDESFKQKDELEAFAETYPQLKPMSEQEPAELIEAVTSAYGQVDVLVSNDIFAPEFQPIDKYAVEDYRGAVEALQIRPFALVNAVASQMKKRKSGHIIFITSATPFGPWKELSTYTSARAGACTLANALSKELGKYNIPVFAIGPNYLHSEDSPYFYPTEPWKTNPEHMAHVKKVTALQRLGTQKELGELVAFLASGSCDYLTGQVFWLAGGFPMIERWPGMPE

SEQ ID NO: 713 - DNA, 774 bp, Artificial Sequence
  HHDH variant
  CDS (1)..(774)
atgagcaccgctatcgtcactaacgtcaaacattttggtggtatgggtagcgctctgaggctgagcgaagctggtcataccgtcgcttgccatgatgaaagctttaaacagaaagatgaactggaagcttttgctgaaacctacccacagctgaaaccaatgagcgaacaggaaccagctgaactgatcgaagctgtcaccagcgcttacggtcaggtcgatgtcctggtcagcaacgatatctttgctccagaatttcagccaatcgataaatacgctgtcgaagattacaggggtgctgtcgaagctctgcagatcaggccatttgctctgatgaatgctgtgacttctcaaatgaagaagcgaaagtcggggcacatcatcttcatcacttcggctactccgttcgggccgtggaaggagctatcgacttacacttcggctcgagctggggcttgtactctagctaatgctctatcgaaggagctaggagagtacaatatcccggtgttcgctatcgggccgaattacctacactcggaggattcgccgtacttctacccgactgagccgtggaagactaatccggagcacatggctcacgtgaagaaggtgactgctctacaacgactagggactcaaaaagagttgggggaattggtggcatttttggcatctggctcttgtgattatttgactggccaggtgttttggttggcaggcggctttcccatgatagaacgttggcccggcatgcccgaataatgaggatcc

SEQ ID NO: 714 - protein, 254 aa, Artificial Sequence
  HHDH variant
MSTAIVTNVKHFGGMGSALRLSEAGHTVACHDESFKQKDELEAFAETYPQLKPMSEQEPAELIEAVTSAYGQVDVLVSNDIFAPEFQPIDKYAVEDYRGAVEALQIRPFALMNAVTSQMKKRKSGHIIFITSATPFGPWKELSTYTSARAGACTLANALSKELGEYNIPVFAIGPNYLHSEDSPYFYPTEPWKTNPEHMAHVKKVTALQRLGTQKELGELVAFLASGSCDYLTGQVFWLAGGFPMIERWPGMPE

SEQ ID NO: 715 - DNA, 774 bp, Artificial Sequence
  HHDH variant
  CDS (1)..(774)
atgagcaccgtcatcgtcaccaacgtcaaacattttggaggtatgggtagcgctctgaggctgagcgaagctggtctgaccgtcgcttgccatgatgaaagctttaaacagaaagatgaactggaagcttttgctgaaacctacccacagctgaaaccaatgagcgaacaggaaccagctgaactgatcgaagctgtcaccagcgcttacggtcaggtcgatgtcctggtcagcaacgatatctttgctccagaatttcagccaatcgataaatacgctgtcgaagattacaggggtgctgtcgaagctctgcagatcaggccatttgctctagtgaatgctgtggcttcgcaaatgaagaagcgaaagtcggggcacatcatcttcatcacttcggctactccgttcgggccatggaaggagctatcgacttacacttcggctcgagctggggcttgtactctagctaatgctctatcgaaggagctaggagagtacaatatcccggtgttcgctatcgggccgaattacctacactcggaggattcgccgtacttctacccgactgagccgtggaagactaatccggagcacatggctcacgtgaagaaggtgactgctctacaacgactagggactcaaaaagagttgggggaattggtggcatttttggcatctggctcttgtgattatttgactggccaggtgttttggttgaccggcggctttcccatgatagaacgttggcccggcatgcccgaataatgaggatcc

SEQ ID NO: 716 - protein, 254 aa, Artificial Sequence
  HHDH variant
MSTVIVTNVKHFGGMGSALRLSEAGLTVACHDESFKQKDELEAFAETYPQLKPMSEQEPAELIEAVTSAYGQVDVLVSNDIFAPEFQPIDKYAVEDYRGAVEALQIRPFALVNAVASQMKKRKSGHIIFITSATPFGPWKELSTYTSARAGACTLANALSKELGEYNIPVFAIGPNYLHSEDSPYFYPTEPWKTNPEHMAHVKKVTALQRLGTQKELGELVAFLASGSCDYLTGQVFWLTGGFPMIERWPGMPE

SEQ ID NO: 717 - DNA, 768 bp, Artificial Sequence
  HHDH variant
  CDS (1)..(768)
atgagcaccgccattgtcaccaacgtcaaacattttggaggtatgggtagcgctctgcgtctgagcgaagctggtcataccgtcgcttgccatgatgaaagctttaagcatcaggatgaactggaagcttttgctgaaacctacccacagctgataccaatgagcgaacaggaaccagctgaactgattgaagctgtcaccagcgctcttggtcaggtcgatgtcctggtcagcaacgatatcgctgctgtggaatggcggccaatcgataaatacgctgtcgaggattacaggggtactgtcgaagctctgcagatcaagccatttgctctagtgaatgctgtcgcttcgcaaatgaagaagcgaaagtcggggcacatcatcttcatcacttcggctgccccgttcgggccatggaaggagctatcgacttactcttcggctcgagctggggctagtgcactagctaatgctctatcgaaggagctaggagagtacaatatcccggtgttcgctatcgctccgaattacctacactcggaggattcgccgtactattacccctctgagccgtggaagacttctccggagcacgtggctcacgtgcgtaaggtgactgctctacaacgactagggactcaagaagagttgggggaattggtgacatttttggcatctggctcttgtgattatttgactggccaggtgttttggttggcaggcggatttcccgtcatcgaacgttggcccggcatgcccgaataatga

SEQ ID NO: 718 - protein, 254 aa, Artificial Sequence
  HHDH variant
MSTAIVTNVKHFGGMGSALRLSEAGHTVACHDESFKHQDELEAFAETYPQLIPMSEQEPAELIEAVTSALGQVDVLVSNDIAAVEWRPIDKYAVEDYRGTVEALQIKPFALVNAVASQMKKRKSGHIIFITSAAPFGPWKELSTYSSARAGASALANALSKELGEYNIPVFAIAPNYLHSEDSPYYYPSEPWKTSPEHVAHVRKVTALQRLGTQEELGELVTFLASGSCDYLTGQVFWLAGGFPVIERWPGMPE

SEQ ID NO: 719 - DNA, 774 bp, Artificial Sequence
  HHDH variant
  CDS (1)..(774)
atgagcaccgctaccgtcaccaacgtcaaacattttggaggtatgggtagcgctctgaggctgagcgaagctggtcataccgtcgcttgccatgatgaaagctttaaacagaaagatgaactggaagcttttgctgaaacctacccacagctgaaaccaatgagcgaacaggaaccagctgaactgatcgaagctgtcaccagcgcttacggtcaggtcgatgtcctggtcagcaacgatatctttgctccagaactgcgtccaatcgataaatacgctgtcgaagattacaggggtgctgtcgaagctctgcagatcaggccatttgctctagtgaatgctgtggcttcgcaaatgaagaagcgaaagtcggggcacatcatcttcatcacttcggctactccgctggggccatggaaggagctatcgacttacacttcggctcgagctggggcttgtactctagctaatgctctatcgaaggagctaggagagtacaatatcccggtgttcgctatcgggccgaattacctacactcggaggattcgccgtacttctacccgactgagccgtggaagactaatccggagcacgtggctcacgtgaagaaggtgactgctctacaacgactagggactcaagaagagttgggggaattggtggcatttttggcatctggctcttgtgattatttgactggccagctgttttggttggcaggcggcttccccatgatagaacgttggcccggcatgcccgaataatgaggatcc

SEQ ID NO: 720 - protein, 254 aa, Artificial Sequence
  HHDH variant
MSTATVTNVKHFGGMGSALRLSEAGHTVACHDESFKQKDELEAFAETYPQLKPMSEQEPAELIEAVTSAYGQVDVLVSNDIFAPELRPIDKYAVEDYRGAVEALQIRPFALVNAVASQMKKRKSGHIIFITSATPLGPWKELSTYTSARAGACTLANALSKELGEYNIPVFAIGPNYLHSEDSPYFYPTEPWKTNPEHVAHVKKVTALQRLGTQEELGELVAFLASGSCDYLTGQLFWLAGGFPMIERWPGMPE

SEQ ID NO: 721 - DNA, 774 bp, Artificial Sequence
  HHDH variant
  CDS (1)..(774)
atgagcaccgctatcgtcaccaacgtcaaacattttggaggtatgggtagcgctctgaggctgagcgaagctggtcataccgtcgcttgccatgatgaaagctttaaacagaaagatgaactggaagcttttgctgaaacctacccacagctgaaaccaatgagcgaacaggaaccagctgaactgatcgaagctgtcaccagcgcttacggtcaggtcgatgtcctggtcagcaacgatatctttgctccagaatttcagccaatcgataaatacgctgtccaggattacaggggtgctgtcgaagctctgcagatcaggccatttgctctagtgaatgctgtggcttcgcaaatgaagaagcgaaagtcggggcacatcatcttcatcacttcggctagtccgttcgggccatggaaggagctatcgacttacacttcggctcgagctggggcttgttccctagctaatgctctatcgaaggagctaggagagtacaatatcccggtgttcgctatcgggccgaattacctacactcggaggattcgccgtacttctacccgactgagccgtggaagactaatccggagcacgtggctcacgtgaagaaggtgactgctctacaacgactagggactcaagaagagttgggggaattggtggcatttttggcatctggctcttgtgattatttgactggccaggtgttttggttggcaggcggctttcccatgatagaacgttggcccggcatgcccgaataatgaggatcc

SEQ ID NO: 722 - protein, 254 aa, Artificial Sequence
  HHDH variant
MSTAIVTNVKHFGGMGSALRLSEAGHTVACHDESFKQKDELEAFAETYPQLKPMSEQEPAELIEAVTSAYGQVDVLVSNDIFAPEFQPIDKYAVQDYRGAVEALQIRPFALVNAVASQMKKRKSGHIIFITSASPFGPWKELSTYTSARAGACSLANALSKELGEYNIPVFAIGPNYLHSEDSPYFYPTEPWKTNPEHVAHVKKVTALQRLGTQEELGELVAFLASGSCDYLTGQVFWLAGGFPMIERWPGMPE

SEQ ID NO: 723 - DNA, 774 bp, Artificial Sequence
  HHDH variant
  CDS (1)..(774)
atgagcaccgctattgtcaccaacgtcaaacattttggaggtatgggtagcgctctgcgtctgagcgaagctggtcataccgtcgcttgccatgatgaaagctttaagcatcaggatgaactagaagcgtttgccgaaacctacccacagctgataccaatgagcgaacaggaaccagctgaactgattgaagctgtcaccagcgctcttggtcatgtcgatgtcctggtcagcaacgatatcgcgcctgtggaatggcggccaatcgatagatacgctgtcgaggattacagggatactgtcgaagctctgcagatcaagccatttgctctagtgaatgctgtcgcttcgcaaatgaagaagcgaaagtcggggcacatcatcttcatcacttcggctgccccgttcgggccatggaaggagctatcgacttactcttcggctcgagctggggctagtgcactagctaatgctctatcgaaggagctaggagagtacaatatcccggtgttcgctatcgctccgaattacctacactcgggggattcgccgtactattaccccactgagccgtggaagacttctctggagcacgtggctcacgtgcgtaaggtgactgctctacaacgactagggactcaagaagagttgggggaattggtgacgtttttggcatctggctcttgtgattatttgactggccaggtgttttggttgacaggcggctttcccgtcatcgaacgttggcccggcatgcccgaataatgaggatcc

SEQ ID NO: 724 - protein, 254 aa, Artificial Sequence
  HHDH variant
MSTAIVTNVKHFGGMGSALRLSEAGHTVACHDESFKHQDELEAFAETYPQLIPMSEQEPAELIEAVTSALGHVDVLVSNDIAPVEWRPIDRYAVEDYRDTVEALQIKPFALVNAVASQMKKRKSGHIIFITSAAPFGPWKELSTYSSARAGASALANALSKELGEYNIPVFAIAPNYLHSGDSPYYYPTEPWKTSLEHVAHVRKVTALQRLGTQEELGELVTFLASGSCDYLTGQVFWLTGGFPVIERWPGMPE

SEQ ID NO: 725 - DNA, 768 bp, Artificial Sequence
  HHDH variant
  CDS (1)..(768)
atgagcaccgctattgtcaccaacgtcaaacattttggaggtatgggtagcgctctgcgtctgagcgaagctggtcataccgtcgcttgccatgatgaaagctttaagcatcaggatgaactggaagcttttgctgaaacctacccacagctgatcccaatgagcgaacaggaaccagctgaactgattgaagctgtcaccagcgctcttggtcaggtcgatgtactggtcagcaacgatatctatcctgtggaatggcggccaatcgataaatacgctgtcgaggattacaggggtactgtcgaagctctgcagatcaagccatttgctctagtgaatgctgtcgcttcgcaaatgaagaagcgaaagtcggggcacatcatcttcatcacttcggctgccccgttcgggccatggaaggagctatcgacttactcttcggctcgagctggggctagtgcactagctaatgctctatcgaaggagctaggagagtacaatatcccggtgttcgctatcgctccgaattacctacactcgggggattcgccgtactattaccccactgagccgtggaagacttctccggagcacgtggctcacgtgcgtaaggtgactgctctacaacgactagggactcaaaaagagctgggggaattggtggcatttttggcatctggctcttgtgattatttgactggccaggtgttttggttgacaggcggctttcccgtcatcgaacgttggcccggcatgcccgaataatga

SEQ ID NO: 726 - protein, 254 aa, Artificial Sequence
  HHDH variant
MSTAIVTNVKHFGGMGSALRLSEAGHTVACHDESFKHQDELEAFAETYPQLIPMSEQEPAELIEAVTSALGQVDVLVSNDIYPVEWRPIDKYAVEDYRGTVEALQIKPFALVNAVASQMKKRKSGHIIFITSAAPFGPWKELSTYSSARAGASALANALSKELGEYNIPVFAIAPNYLHSGDSPYYYPTEPWKTSPEHVAHVRKVTALQRLGTQKELGELVAFLASGSCDYLTGQVFWLTGGFPVIERWPGMPE

SEQ ID NO: 727 - DNA, 765 bp, Artificial Sequence; identical to SEQ ID NO: 45
  HHDH variant
  CDS (1)..(765)

SEQ ID NO: 728 - protein, 254 aa, Artificial Sequence; identical to SEQ ID NO: 46
  HHDH variant

SEQ ID NO: 729 - DNA, 768 bp, Artificial Sequence
  HHDH variant
  CDS (1)..(768)
atgagcaccgctattgtcaccaacgtcaaacattttggaggtatgggtagcgctctgcgtctgagcgaagctggtcataccgtcgcttgccatgatgaaagctttaagcatcaggatgaactagaagcttttgctgaaacctacccacagctgataccaatgagcgaacaggaaccagctgaactgattgaagctgtcaccagcgctcttggtcatgtcgatgtcctggtcagcaacgatatcgcgcctgtggaatggcggccaatcgataaatacgctgtcgaggattacagggatactgtcgaagctctgcagatcaagccatttgctctagtgaatgctgtcgcttcgcaaatgaagaagcgaaagtcggggcacatcatcttcatcacttcggctgccccgttcgggccatggaaggagctatcgacttactcttcggctcgagctggggctagtgcactagctaatgctctatcgaaggagctaggagagtacaatatcccggtgttcgctatcgctccgaattacctacactcgggggattcgccgtactattacccctctgagccgtggaagacttctccggagcacgtggctcacgtgcgtaaggtgactgctctacaacgactagggactcaaaaagagttgggggaattggtgacgtttttggcatctggctcttgtgattatttgactggccaggtgttttggttggcaggcggctttcccgtcatcgaacgttggcccggcatgcccgaataatga

SEQ ID NO: 730 - protein, 254 aa, Artificial Sequence
  HHDH variant
MSTAIVTNVKHFGGMGSALRLSEAGHTVACHDESFKHQDELEAFAETYPQLIPMSEQEPAELIEAVTSALGHVDVLVSNDIAPVEWRPIDKYAVEDYRDTVEALQIKPFALVNAVASQMKKRKSGHIIFITSAAPFGPWKELSTYSSARAGASALANALSKELGEYNIPVFAIAPNYLHSGDSPYYYPSEPWKTSPEHVAHVRKVTALQRLGTQKELGELVTFLASGSCDYLTGQVFWLAGGFPVIERWPGMPE

SEQ ID NO: 731 - DNA, 768 bp, Artificial Sequence
  HHDH variant
  CDS (1)..(768)
atgagcaccgctattgtcaccaacgtcaaacattttggaggtatgggtagcgctctgaggctgagcgaagctggtcataccgtcgcttgccatgatgaaagctttaagcataaagatgaactggaagcttttgctgaaacctacccacagctgcgtccaatgagcgaacaggaaccagctgaactgattgaagctgtcaccagcgcttttggtcaggtcgatgtcctggtcagcaacgatatcgctgctgtggaatggcggccaatcgataaatacgctgtcgaggattacaggggtgctgtcgaagctctgcagatcaggccatttgctctagtgaatgctgtggcttcgcaaatgaagaagcgaaagtcggggcacatcatcttcatcacttcggctgccccgttcgggccatggaaggagctatcgacttactcttcggctcgagctggggctagtgcactagctaatgctctatcgaaggagctaggagagtacaatatcccggtgttcgctatcgctccgaattacctacactcggaggattcgccgtactattaccccactgagccgtggaagattaatccggagcacgtgactcacgtgcgtaaggtgactgctctacaacgactagggactcaaaaagagttgggggaattggtggcatttttggcatctggctcttgtgattatttgactggccaggtgttttggttggcaggcggctttcccgtcatagaacgttggcccggcatgcccgaataatga

SEQ ID NO: 732 - protein, 254 aa, Artificial Sequence
  HHDH variant
MSTAIVTNVKHFGGMGSALRLSEAGHTVACHDESFKHKDELEAFAETYPQLRPMSEQEPAELIEAVTSAFGQVDVLVSNDIAAVEWRPIDKYAVEDYRGAVEALQIRPFALVNAVASQMKKRKSGHIIFITSAAPFGPWKELSTYSSARAGASALANALSKELGEYNIPVFAIAPNYLHSEDSPYYYPTEPWKINPEHVTHVRKVTALQRLGTQKELGELVAFLASGSCDYLTGQVFWLAGGFPVIERWPGMPE

SEQ ID NO: 733 - DNA, 768 bp, Artificial Sequence
  HHDH variant
  CDS (1)..(768)
atgagcaccgctattgtcacgaacgtcaaacattttggaggtatgggtagcgctctgaggctgagcgaagctggtcataccgtcgcttgccatgatgaaagctttaagcataaagatgaactggaagcttttgctgacgcctacccacagctgataccaatgagcgaacaggaaccagctgaactgattgaagctgtcaccagcgcttttggtcatgtcgatgtcctggtcagcaacgatatcgctgctgtggaatggcggccaatcgataaatacgctgtcgaggattacaggggtgctgtcgaagctctgcagatccgcccatttgctctagtgaatgctgtggcttcgcaaatgaagaagcgaaagtcggggcacatcatcttcatcacttcggctgccccgttcgggccatggaaggagctatcgacttactcttcggctcgagctggggctagtgcactagctaatgctctatcgaaggagctaggagagtacaatatcccggtgttcgctatcgctccgaattacctacactcggaggattcgccgtactattacccctctgagccgtggaagacttctccggagcacgtggctcacgtgcgtaaggtgactgctctacaacgactagggactcaaaaagagttgggggaattggtggcatttttggcatctggctcttgtgattatttgactggccaggtgttttggttggcaggcggctttcccgtcatagaacgttggcccggcatgcccgaataatga

SEQ ID NO: 734 - protein, 254 aa, Artificial Sequence
  HHDH variant
MSTAIVTNVKHFGGMGSALRLSEAGHTVACHDESFKHKDELEAFADAYPQLIPMSEQEPAELIEAVTSAFGHVDVLVSNDIAAVEWRPIDKYAVEDYRGAVEALQIRPFALVNAVASQMKKRKSGHIIFITSAAPFGPWKELSTYSSARAGASALANALSKELGEYNIPVFAIAPNYLHSEDSPYYYPSEPWKTSPEHVAHVRKVTALQRLGTQKELGELVAFLASGSCDYLTGQVFWLAGGFPVIERWPGMPE

SEQ ID NO: 735 - DNA, 768 bp, Artificial Sequence
  HHDH variant
  CDS (1)..(768)
atgagcaccgctattgtcaccaacgtcaaacattttggaggtatgggtagcgctctgcgtctgagcgaagctggtcataccgtcgcttgccatgatgaaagctttaagcatcaggatgaactggaagcttttgctgaaacctacccacagctgataccaatgagcgaacaggaaccagctgaactgattgaagctgtcaccagcgctcttggtcaggtcgatgtcctggtcagcaacgatatcgctgctgtggaatggcggccaatcgataaatacgctgtcgaggattacaggggtactgtcgaagctctgcagatcaagccatttgctctagtgaatgctgtcgcttcgcaaatgaagaagcgaaagtcggggcacatcatcttcatcacttcggctgccccgttcgggccatggaaggagctatcgacttactcttcggctcgagctggggctagtgcactagctaatgctctatcgaaggagctaggagagtacaatatcccggtgttcgctatcgctccgaattacctacactcggaggattcgccgtactattacccctctgagccgtggaagacttctccggagcacgtggctcacgtgcgtaaggtgactgctctacaacgactagggactcaaaaagagttgggggaattggtgacatttttggcatctggctcttgtgattatttgactggccaggtgttttggttggcaggcggctttcccgtcatcgaacgttggcccggcatgcccgaataatga

SEQ ID NO: 736 - protein, 254 aa, Artificial Sequence
  HHDH variant
MSTAIVTNVKHFGGMGSALRLSEAGHTVACHDESFKHQDELEAFAETYPQLIPMSEQEPAELIEAVTSALGQVDVLVSNDIAAVEWRPIDKYAVEDYRGTVEALQIKPFALVNAVASQMKKRKSGHIIFITSAAPFGPWKELSTYSSARAGASALANALSKELGEYNIPVFAIAPNYLHSEDSPYYYPSEPWKTSPEHVAHVRKVTALQRLGTQKELGELVTFLASGSCDYLTGQVFWLAGGFPVIERWPGMPE

SEQ ID NO: 737 - DNA, 774 bp, Artificial Sequence
  HHDH variant
  CDS (1)..(774)
atgagcaccgctattgtcaccaacgtcaaacattttggaggtatgggtagcgctctgcgtctgagcgaagctggtcataccgtcgcttgccatgatgaaagctttaagcatcaggatgaactagaagcttttgctgaaacctacccacagctgataccaatgagcgaacaggaaccagctgaactgattgaagctgtcaccagcgctcttggtcatgtcgatgtcctggtcagcaacgatatcgcgcctgtggaatggcggccaatcgataaatacgctgtcgaggattacagggatactgtcgaagctctgcagatcaagccatttgctctagtgaaggctgtcgcttcgcaaatgaagaagcgaaagtcggggcacatcatcttcatcacttcggctgccccgttcgggccacgtaaggagatctcgacttactcttcggctcgagctggggctagtgcactagctaatgctctatcgaaggagctaggagtagacaatatcccggtgttcgctatcgctccggagtacctacactcgggggattcgccgtactattacccctctgagccgtggaagacttctccggagcacgtggctcacgtgcgtaaggtgactgctctacaacgactagggactcaaaaagagttgggggaattggtgacgtttttggcatctggctcttgtgattatttgactggccaggtgttttggttggcaggcggctttcccgtcatcgaacgttggcccggcatgcccgaataatgaggatcc

SEQ ID NO: 738 - protein, 254 aa, Artificial Sequence
  HHDH variant
MSTAIVTNVKHFGGMGSALRLSEAGHTVACHDESFKHQDELEAFAETYPQLIPMSEQEPAELIEAVTSALGHVDVLVSNDIAPVEWRPIDKYAVEDYRDTVEALQIKPFALVKAVASQMKKRKSGHIIFITSAAPFGPRKEISTYSSARAGASALANALSKELGVDNIPVFAIAPEYLHSGDSPYYYPSEPWKTSPEHVAHVRKVTALQRLGTQKELGELVTFLASGSCDYLTGQVFWLAGGFPVIERWPGMPE

SEQ ID NO: 739 - DNA, 774 bp, Artificial Sequence
  HHDH variant
  CDS (1)..(774)
atgagcaccgctatcgtcaccaacgtcaaacattttggaggtatgggtagcgctctgaggctgagcgaagctggtcataccgtcgcttgccatgatgaaagctttaaacagaaagatgaactggaagcttttgctgaaacctacccacagctgaaaccaatgagcgaacaggaaccagctgaactgatcgaagctgtcaccagcgcttacggtcaggtcgatgtcctggtcagcaacgatatctttgctccagaatttcagccaatcgataaatacgctgtcgaagattacaggggtgctgtcgaagctctgcagatcaggccatttgctctagtgaatgctgtggcttcgcaaatgaagaagcgaaagtcggggcacatcatcttcatcacttcggctactccgttcgggccatggaaggagctatcgacttacacttcggctcgagctggggcttgtactctagctaatgctctatcgaaggagctaggagagtacaatatcccggtgttcgctatcgggccgaattacctacactcggaggattcgccgtacttctacccgactgagccgtggaagactaatccggagcacgtggctcacgtgaagaaggtgactgctctacaacgactagggactcaaaaagagttgggggaattggtggcatttttggcatctggctcttgtgattatttgactggccaggtgttttggttggcaggcggctttcccatgatagaacgttggcccggcatgcccgaataatgaggatcc

SEQ ID NO: 740 - protein, 254 aa, Artificial Sequence; identical to SEQ ID NO: 2
  HHDH variant

SEQ ID NO: 741 - DNA, 765 bp, Artificial Sequence; identical to SEQ ID NO: 69
  HHDH variant
  CDS (1)..(765)

SEQ ID NO: 742 - protein, 254 aa, Artificial Sequence; identical to SEQ ID NO: 70
  HHDH variant

SEQ ID NO: 743 - DNA, 765 bp, Artificial Sequence
  HHDH variant
  CDS (1)..(765)
atgagcaccgctattgtcaccaacgtcaaacattttggaggtatgggtagcgctctgcgtctgagcgaagctggtcataccgtcgcttgccatgatgaaagctttaagcatcaggatcaactgaaagcttttgctaaaacctacccacagctgatcccaatgagcgaacaggaaccagctgaactgattgaagctgtcaccagcgctcttggtcaggtcgatgtactggtcagcaacgatatctatcctgtggaatggcggccaatcgataaatacgctgtcgaggattacaggggtactgtcgaagctctgcagatcaagccatttgctctagtgaatgctgtcgcttcgcaaatgaagaagcgaaagtcggggcacatcatcttcatcacttcggctgccccgttcgggccatggaaggagctatcgacttactcttcggctcgagctggggctagtgcactagctaatgctctatcgaaggagctaggagagtacaatatcccggtgttcgctatcgctccgaattacctacactcgggggattcgccgtactattaccccactgagccgtggaagacttctccggagcacgtggctcacgtgcgtaaggtgactgctctacaacgactagggactcaaaaagagctgggggaattggtggcatttttggcatctggctcttgtgattatttgactggccaggtgttttggttgacaggcggctttcccgtcatcgaacgttggcccggcatgcccgaataa

SEQ ID NO: 744 - protein, 254 aa, Artificial Sequence
  HHDH variant
MSTAIVTNVKHFGGMGSALRLSEAGHTVACHDESFKHQDQLKAFAKTYPQLIPMSEQEPAELIEAVTSALGQVDVLVSNDIYPVEWRPIDKYAVEDYRGTVEALQIKPFALVNAVASQMKKRKSGHIIFITSAAPFGPWKELSTYSSARAGASALANALSKELGEYNIPVFAIAPNYLHSGDSPYYYPTEPWKTSPEHVAHVRKVTALQRLGTQKELGELVAFLASGSCDYLTGQVFWLTGGFPVIERWPGMPE

SEQ ID NO: 745 - DNA, 768 bp, Artificial Sequence
  HHDH variant
  CDS (1)..(768)
atgagcaccgctattgtcaccaacgtcctgcattttggaggtatgggtagcgctctgcgtctgagcgaagctggtcataccgtcgcttgccatgatgaaagctttaagcatcaggatgaactagaagcttttgctgaaacctacccacagctgataccaatgagcgaacaggaaccagctgaactgattgaagctgtcaccagcgcccttggtcatgtcgatatcctggtcagcaacgatatcgcgcctgtggaatggcggccaatcgataaatacgctgtcgaggattacagggatactgtcgaagctctgcagatcaagccatttgctctagtgaatgctgtcgcttcgcaaatgaaggatcgaaagtcggggcacatcatcttcatcacttcggctgccccgttcgggccatggaaggagctatcgacttactcttcggctcgagctgggaccagtgcactagctaatgctctatcgaaggagctaggagagtacaatatcccggtgttcgctatcgctccgaattttctagactcgggggattcgccgtactattacccctctgagccgtggaagacttctccggagcacgtggctcacgtgcgtaaggtgactgctctacaacgactagggactcaaaaagagttgggggaattggtgacgtttttggcatctggctcttgtgattatttgactggccaggtgttttggttggcaggcggctttcccgttgtagagcgttggcccggcatgcccgaataatga

SEQ ID NO: 746 - protein, 254 aa, Artificial Sequence
  HHDH variant
MSTAIVTNVLHFGGMGSALRLSEAGHTVACHDESFKHQDELEAFAETYPQLIPMSEQEPAELIEAVTSALGHVDILVSNDIAPVEWRPIDKYAVEDYRDTVEALQIKPFALVNAVASQMKDRKSGHIIFITSAAPFGPWKELSTYSSARAGTSALANALSKELGEYNIPVFAIAPNFLDSGDSPYYYPSEPWKTSPEHVAHVRKVTALQRLGTQKELGELVTFLASGSCDYLTGQVFWLAGGFPVVERWPGMPE

SEQ ID NO: 747 - DNA, 768 bp, Artificial Sequence
  HHDH variant
  CDS (1)..(768)
atgagcaccgctattgtcaccaacgtcaagcattttggaggtatgggtagcgctctgcgtctgagcgaagctggtcataccgtcgcttgccatgatgaaagctttaagcatctggatgaactagaagcttttgctgaaacctacccacagctgataccaatgagcgaacaggaaccagctgaactgattgaagctgtcaatagcgcccttggtcatgtcgatatcctggtcagcaacgatatcgcgcctgtggaatggcggccaatcgataaatacgctgtcgaggattacagggatactgtcgaagctctgcagatcaagccatttgctctagcaaatgccgtcgcttcgcaaatgaaggatcgaaagtcggggcacatcatcttcatcacttcggctgccccgttcgggccatggaaggagctatcgacttactcttcggctcgagctgggaccagtgcactagctaatgctctatcgaaggagctaggagagtacaatatcccggtgttcgctatcgctccgaacgccctagactcgggggattcgccgtactattacccctctgagccgtggaagacttctccggagcacgtggctcacgtgcgtaagtacactgctctacaacgactagggactcaaaaagagttgggggaattggtgacgtttttggcatctggctcttgtgattatttgactggccaggtgttttgtttggcaggcggctttcccgttgtagagcgttggcccggcatgcccgaataatga

SEQ ID NO: 748 - protein, 254 aa, Artificial Sequence
  HHDH variant
MSTAIVTNVKHFGGMGSALRLSEAGHTVACHDESFKHLDELEAFAETYPQLIPMSEQEPAELIEAVNSALGHVDILVSNDIAPVEWRPIDKYAVEDYRDTVEALQIKPFALANAVASQMKDRKSGHIIFITSAAPFGPWKELSTYSSARAGTSALANALSKELGEYNIPVFAIAPNALDSGDSPYYYPSEPWKTSPEHVAHVRKYTALQRLGTQKELGELVTFLASGSCDYLTGQVFCLAGGFPVVERWPGMPE

SEQ ID NO: 749 - DNA, 768 bp, Artificial Sequence
  HHDH variant
  CDS (1)..(768)
atgagcaccgctattgtcaccaacgtcaagcattttggaggtatgggtagcgctctgcgtctgagcgaagctggtcataccgtcgcttgccatgatgaaagctttaagcatcaggatgaactagaagcttttgctgaaacctacccacagctgataccaatgagcgaacaggaaccagctgaactgattgaagctgtcaatagcgcccttggtcatgtcgatatcctggtcagcaacgatatcgcgcctgtggaatggcggccaatcgataaatacgctgtcgaggattacagggatactgtcgaagctctgcagatcaagccatttgctctagcaaatgccgtcgcttcgcaaatgaagcgtcgaaagtcggggcacatcatcttcatcacttcggctgcctcattcgggccatggaaggagctatcgacttacgcatcggctcgagctggggcgagtgcactagctaatgctctatcgaaggagctaggagagtacaatatcccggtgttcgctatcgctccgaacgccctagactcgggggattcgccgtactattacccctctgagccgtggaagacttctccggagcacgtggctcacgtgcgtaaggtgactgctctacaacgactagggactcaaaaagagttgggggaattggtgacgtttttggcatctggctcttgtgattatttgactggccaggtgttttggttggcaggcggctttcccgttgtagagcgttggcccgacacccccgaataatga

SEQ ID NO: 750 - protein, 254 aa, Artificial Sequence
  HHDH variant
MSTAIVTNVKHFGGMGSALRLSEAGHTVACHDESFKHQDELEAFAETYPQLIPMSEQEPAELIEAVNSALGHVDILVSNDIAPVEWRPIDKYAVEDYRDTVEALQIKPFALANAVASQMKRRKSGHIIFITSAASFGPWKELSTYASARAGASALANALSKELGEYNIPVFAIAPNALDSGDSPYYYPSEPWKTSPEHVAHVRKVTALQRLGTQKELGELVTFLASGSCDYLTGQVFWLAGGFPVVERWPDTPE

SEQ ID NO: 751 - DNA, 768 bp, Artificial Sequence
  HHDH variant
  CDS (1)..(768)
atgagcaccgctattgtcaccaacgtcaagcattttggaggtatgggtagcgctctgcgtctgagcgaagctggtcataccgtcgcttgccatgatgaaagctttaagcatctggatgaactagaagcttttgctgaaacctacccacagctgataccaatcagcgaacaggaaccagctgaactgattgaagctgtcactagcgcccttggtcatgtcgatatcctggtcagcaacgatatcgcgcctgtggaatggcggccaatcgataaatacgctgtcgaggattacaggggcatggtcgaagctctgcagatcaagccatttgctctagcaaatgccgtcgcttcgcaaatgaagcgtcgaaagtcggggcacatcatcttcatcacttcggctgcctcattcgggccatggaaggagctatcgacttacgcatcggctcgagctgggaccagtgcactagctaatgctctatcgaaggagctaggagagtacaatatcccggtgttcgctatcgctccgaacgccctagactcgggggattcgccgtactattacccctctgagccgtggaagacttctccggagcacgtggctcacgtgcgtaaggtgactgctctacaacgactagggactcaaaaagagttgggggaattggtgacgtttttggcatctggctcttgtgattatttgactggccaggtgtttaccttggcaggcggctttcccgttgtagagcgttggcccggcatgcccgaataatga

SEQ ID NO: 752 - protein, 254 aa, Artificial Sequence
  HHDH variant
MSTAIVTNVKHFGGMGSALRLSEAGHTVACHDESFKHLDELEAFAETYPQLIPISEQEPAELIEAVTSALGHVDILVSNDIAPVEWRPIDKYAVEDYRGMVEALQIKPFALANAVASQMKRRKSGHIIFITSAASFGPWKELSTYASARAGTSALANALSKELGEYNIPVFAIAPNALDSGDSPYYYPSEPWKTSPEHVAHVRKVTALQRLGTQKELGELVTFLASGSCDYLTGQVFTLAGGFPVVERWPGMPE

SEQ ID NO: 753 - DNA, 768 bp, Artificial Sequence; identical to SEQ ID NO: 749
  HHDH variant
  CDS (1)..(768)

SEQ ID NO: 754 - protein, 254 aa, Artificial Sequence; identical to SEQ ID NO: 750
  HHDH variant

SEQ ID NO: 755 - DNA, 768 bp, Artificial Sequence
  HHDH variant
  CDS (1)..(768)
atgagcaccgctattgtcaccaacgtcaagcattttggaggtatgggtagcgctctgcgtctgagcgaagctggtcataccgtcgcttgccatgatgaaagctttaagcatcaggatgaactagaagcttttgctgaaacctacccacagctgataccaatgagcgaacaggaaccagctgaactgattgaagctgtcactagcgcccttggtcatgtcgatatcctggtcagcaacgatatcgcgcctgtggaatggcggccaatcgataaatacgctgtcgaggattacagggatactgtcgaagctctgcagatcaagccattcgctctagcaaatgccgtcgcttcgcaaatgaagcgtcgaaagtcggggcacatcatcttcatcacttcggctgcctcattcgggccatggaaggagctatcgacttactcttcggctcgagctgggaccagtgcactagctaatgctctatcgaaggagctaggagagtacaatatcccggtgttcgctatcgctccgaacgccctagactcgggggattcgccgtactattacccctctgagccgtggaagacttctccggagcacgtggctcacgtgcgtaaggtgactgctctacaacgactagggactcaaaaagagttgggggaattggtgacgtttttggcatctggctcttgtgattatttgactggccaggtgtttaccttggcaggcggctttcccgttgtagagcgttggcccggcatgcccgaataatga

SEQ ID NO: 756 - protein, 254 aa, Artificial Sequence
  HHDH variant
MSTAIVTNVKHFGGMGSALRLSEAGHTVACHDESFKHQDELEAFAETYPQLIPMSEQEPAELIEAVTSALGHVDILVSNDIAPVEWRPIDKYAVEDYRDTVEALQIKPFALANAVASQMKRRKSGHIIFITSAASFGPWKELSTYSSARAGTSALANALSKELGEYNIPVFAIAPNALDSGDSPYYYPSEPWKTSPEHVAHVRKVTALQRLGTQKELGELVTFLASGSCDYLTGQVFTLAGGFPVVERWPGMPE

SEQ ID NO: 757 - DNA, 768 bp, Artificial Sequence
  HHDH variant
  CDS (1)..(768)
atgagcaccgctattgtcaccaacgtcaagcattttggaggtatgggtagcgctctgcgtctgagcgaagctggtcataccgtcgcttgccatgatgaaagctttaagcatctggatgaactagaagcttttgctgaaacctacccacagctgataccaatgagcgaacaggaaccagctgaactgattgaagctgtcactagcgcccttggtcatgtcgatatcctggtcagcaacgatatcgcgcctgtggaatggcggccaatcgataaatacgctgtcgaggattacagggacatggtcgaagctctgcagatcaagccatttgctctagcaaatgccgtcgcttcgcaaatgaaggagcgaaagtcggggcacatcatcttcatcacttcggctgcctcattcgggccatggaaggagctatcgacttactcttcggctcgagctgggaccagtgcactagctaatgctctatcgaaggagctaggagagtacaatatcccggtgttcgctatcgctccgaacgccctagactcgggggattcgccgtactattacccctctgagccgtggaagacttctccggagcacgtggctcacgtgcgtaagtacactgctctacaacgactagggactcaaaaagagttgggggaattggtgacgtttttggcatctggctcttgtgattatttgactggccaggtgtttaccttggcaggcggctttcccgttgtagagcgttggccctccatgcccgaataatga

SEQ ID NO: 758 - protein, 254 aa, Artificial Sequence
  HHDH variant
MSTAIVTNVKHFGGMGSALRLSEAGHTVACHDESFKHLDELEAFAETYPQLIPMSEQEPAELIEAVTSALGHVDILVSNDIAPVEWRPIDKYAVEDYRDMVEALQIKPFALANAVASQMKERKSGHIIFITSAASFGPWKELSTYSSARAGTSALANALSKELGEYNIPVFAIAPNALDSGDSPYYYPSEPWKTSPEHVAHVRKYTALQRLGTQKELGELVTFLASGSCDYLTGQVFTLAGGFPVVERWPSMPE

SEQ ID NO: 759 - DNA, 768 bp, Artificial Sequence
  HHDH variant
  CDS (1)..(768)
atgagcaccgctattgtcaccaacgtcaagcattttggaggtatgggtagcgctctgcgtctgagcgaagctggtcataccgtcgcttgccatgatgaaagctttaagcatctggatgaactagaagcttttgctgaaacctacccacagctgataccaatgagcgaacaggaaccagctgaactgattgaagctgtcaatagcgcccttggtcatgtcgatatcctggtcagcaacgatatcgcgcctgtggaatggcggccaatcgataaatacgctgtcgaggattacaggggcatggtcgaagctctgcagatcaagccatttgctctagcaaatgccgtcgcttcgcaaatgaaggatcgaaagtcggggcacatcatcttcatcacttcggctgccccgttcgggccatggaaggagctatcgacttacgcatcggctcgagctgggaccagtgcactagctaatgctctatcgaaggagctaggagagtacaatatcccggtgttcgctatcgctccgaacgccctagactcgggggattcgccgtactattacccctctgagccgtggaagacttctccggagcacgtggctcacgtgcgtaaggtgactgctctacaacgactagggactcaaaaagagttgggggaattggtgacgtttttggcatctggctcttgtgattatttgactggccaggtgtttaccttggcaggcggctttcccgttgtagagcgttggcccgagatgcccgaataatga

SEQ ID NO: 760 - protein, 254 aa, Artificial Sequence
  HHDH variant
MSTAIVTNVKHFGGMGSALRLSEAGHTVACHDESFKHLDELEAFAETYPQLIPMSEQEPAELIEAVNSALGHVDILVSNDIAPVEWRPIDKYAVEDYRGMVEALQIKPFALANAVASQMKDRKSGHIIFITSAAPFGPWKELSTYASARAGTSALANALSKELGEYNIPVFAIAPNALDSGDSPYYYPSEPWKTSPEHVAHVRKVTALQRLGTQKELGELVTFLASGSCDYLTGQVFTLAGGFPVVERWPEMPE

SEQ ID NO: 761 - DNA, 768 bp, Artificial Sequence
  HHDH variant
  CDS (1)..(768)
atgagcaccgctattgtcaccaacgtcaagcattatggaggtatgggtagcgctctgcgtctgagcgaagctggtcataccgtcgcttgccatgatgaaagctttaagcatctggatgaactagaagcttttgctgaaacctacccacagctgataccaatcagcgaacaggaaccagctgaactgattgaagctgtcactagcgcccttggtcatgtcgatatcctggtcagcaacgatatcgcgcctgtggaatggcggccaatcgataaatacgctgtcgaggattacagggacatggtcgaagctctgcagatcaagccatttgctctagcaaatgccgtcgcttcgcaaatgaagcgtcgaaagtcggggcacatcatcttcatcacttcggctgccccgttcgggccatggaaggagctatcgacttacgcatcggctcgagctgggaccagtgcactagctaatgctctatcgaaggagctaggagagtacaatatcccggtgttcgctatcgctccgaacgccctagactcgggggattcgccgtactattacccctctgagccgtggaagacttctccggagcacgtggctcacgtgcgtaagtacactgctctacaacgactagggactcaaaaagagttgggggaattggtgacgtttttggcatctggctcttgtgattatttgactggccaggtgttttggttggcaggcggctttcccgttgtagagcgttggccctccatgcccgaataatga

SEQ ID NO: 762 - protein, 254 aa, Artificial Sequence
  HHDH variant
MSTAIVTNVKHYGGMGSALRLSEAGHTVACHDESFKHLDELEAFAETYPQLIPISEQEPAELIEAVTSALGHVDILVSNDIAPVEWRPIDKYAVEDYRDMVEALQIKPFALANAVASQMKRRKSGHIIFITSAAPFGPWKELSTYASARAGTSALANALSKELGEYNIPVFAIAPNALDSGDSPYYYPSEPWKTSPEHVAHVRKYTALQRLGTQKELGELVTFLASGSCDYLTGQVFWLAGGFPVVERWPSMPE

SEQ ID NO: 763 - DNA, 768 bp, Artificial Sequence
  HHDH variant
  CDS (1)..(768)
atgagcaccgctattgtcaccaacgtcaagcattttggaggtatgggtagcgctctgcctctgagcgaagctggtcataccgtcgcttgccatgatgaaagctttaagcatcaggatgaactagaagcttttgctgaaacctacccacagctgataccaatcagcgaacaggaaccagctgaactgattgaagctgtcactagcgcccttggtcatgtcgatatcctggtcagcaacgatatcgcgcctgtggaatggcggccaatcgataaatacgctgtcgaggattacagggacatggtcgaagctctgcagatcaagccatttgctctagcaaatgccgtcgcttcgcaaatgaaggagcgaaagtcggggcacatcatcttcatcacttcggctgccccgttcgggccatggaaggagctatcgacttacgcatcggctcgagctgggaccagtgcactagctaatgctctatcgaaggagctaggagagtacaatatcccggtgttcgctatcgctccgaacgccctagactcgggggattcgccgtactattacccctctgagccgtggaagacttctccggagcacgtggctcacgtgcgtaaggtgactgctctacaacgactagggactcaaaaagagttgggggaattggtgacgtttttggcatctggctcttgtgattatttgactggccaggtgtttaccttggcaggcggttttcccgttgtagagcgttggcccggcatgcccgaataatga

SEQ ID NO: 764 - protein, 254 aa, Artificial Sequence
  HHDH variant
MSTAIVTNVKHFGGMGSALPLSEAGHTVACHDESFKHQDELEAFAETYPQLIPISEQEPAELIEAVTSALGHVDILVSNDIAPVEWRPIDKYAVEDYRDMVEALQIKPFALANAVASQMKERKSGHIIFITSAAPFGPWKELSTYASARAGTSALANALSKELGEYNIPVFAIAPNALDSGDSPYYYPSEPWKTSPEHVAHVRKVTALQRLGTQKELGELVTFLASGSCDYLTGQVFTLAGGFPVVERWPGMPE

SEQ ID NO: 765 - DNA, 768 bp, Artificial Sequence
  Variant HHDH
  CDS (1)..(768)
atgagcaccgctattgtcaccaacgtcaagcattttggaggtatgggtagcgctctgcgtctgagcgaagctggtcataccgtcgcttgccatgatgaaagctttaagcatctggatgaactagaagcttttgctgaaacctacccacagctgataccaatgagcgaacaggaaccagctgaactgattgaagctgtcactagcgcccttggtcatgtcgatatcctggtcagcaacgatatcgcgcctgtggaatggcggccaatcgataaatacgctgtcgaggattacagggatactgtcgaagctctgcagatcaagccatttgctctagcgaatgccgtcgcttcgcaaatgaaggagcgaaagtcggggcacatcatcttcatcacttcggctgcctcattcgggccatggaaggagctatcgacttacgcatcggctcgagctgggaccagtgcactagctaatgctctatcgaaggagctaggagagtacaatatcccggtgttcgctatcgctccgaacgccctagactcgggggattcgccgtactattacccctctgagccgtggaagacttctccggagcacgtggctcacgtgcgtaaggtgactgctctacaacgactagggactcaaaaagagttgggggaattggtgacgtttttggcatctggctcttgtgattatttgactggccaggtgttttggttggcaggcggctttcccgttgtagagcgttggcccggcatgcccgaataatga

SEQ ID NO: 766 - protein, 254 aa, Artificial Sequence
  Variant HHDH
MSTAIVTNVKHFGGMGSALRLSEAGHTVACHDESFKHLDELEAFAETYPQLIPMSEQEPAELIEAVTSALGHVDILVSNDIAPVEWRPIDKYAVEDYRDTVEALQIKPFALANAVASQMKERKSGHIIFITSAASFGPWKELSTYASARAGTSALANALSKELGEYNIPVFAIAPNALDSGDSPYYYPSEPWKTSPEHVAHVRKVTALQRLGTQKELGELVTFLASGSCDYLTGQVFWLAGGFPVVERWPGMPE

SEQ ID NO: 767 - DNA, 768 bp, Artificial Sequence
  HHDH variant
  CDS (1)..(768)
atgagcaccgctattgtcaccaacgtcaagcattttggaggtatgggtagcgctctgcgtctgagcgaagctggtcataccgtcgcttgccatgatgaaagctttaagcatctggatgaactagaagcttttgctgaaacctacccacagctgataccaatcagcgaacaggaaccagctgaactgattgaagctgtcactagcgcccttggtcatgtcgatatcctggtcagcaacgatatcgcgcctgtggaatggcggccaatcgataaatacgctgtcgaggattacagggatactgtcgaagctctgcagatcaagccatttgctctagcaaatgccgtcgcttcgcaaatgaaggagcgaaagtcggggcacatcatcttcatcacttcggctgcctcattcgggccatggaaggagctatcgacttactcttcggctcgagctgggaccagtgcactagctaatgctctatcgaaggagctaggagagtacaatatcccggtgttcgctatcgctccgaacgccctagactcgggggattcgccgtactattacccctctgagccgtggaagacttctccggagcacgtggctcacgtgcgtaaggtgactgctctacaacgactagggactcaaaaagagttgggggaattggtgacgtttttggcatctggctcttgtgattatttgactggccaggtgtttaccttggcaggcggctttcccgttgtagagcgttggcccggcatgcccgaataatga

SEQ ID NO: 768 - protein, 254 aa, Artificial Sequence
  HHDH variant
MSTAIVTNVKHFGGMGSALRLSEAGHTVACHDESFKHLDELEAFAETYPQLIPISEQEPAELIEAVTSALGHVDILVSNDIAPVEWRPIDKYAVEDYRDTVEALQIKPFALANAVASQMKERKSGHIIFITSAASFGPWKELSTYSSARAGTSALANALSKELGEYNIPVFAIAPNALDSGDSPYYYPSEPWKTSPEHVAHVRKVTALQRLGTQKELGELVTFLASGSCDYLTGQVFTLAGGFPVVERWPGMPE

SEQ ID NO: 769 - DNA, 768 bp, Artificial Sequence
  HHDH variant
  CDS (1)..(768)
atgagcaccgctattgtcaccaacgtcaagcattttggaggtatgggtagcgctctgcgtctgagcgaagctggtcataccgtcgcttgccatgatgaaagctttaagcatctggatgaactagaagcttttgctgaaacctacccacagctgataccaatgagcgaacaggaaccagctgaactgattgaagctgtcactagcgcccttggtcatgtcgatatcctggtcagcaacgatatcgcgcctgtggaatggcggccaatcgataaatacgctgtcgaggattacagggatactgtcgaagctctgcagatcaagccatttgctctagcaaatgccgtcgcttcgcaaatgaaggagcgaaagtcggggcacatcatcttcatcacttcggctgcctcattcgggccatggaaggagctatcgacttacgcatcggctcgagctgggaccagtgcactagctaatgctctatcgaaggagctaggagagtacaatatcccggtgttcgctatcgctccgaacgccctagactcgggggattcgccgtactattacccctctgagccgtggaagacttctccggagcacgtggctcacgtgcgtaaggtgactgctctacaacgactagggactcaaaaagagttgggggaattggtgacgtttttggcatctggctcttgtgattatttgactggccaggtgttttggctggcaggcggctttcccgttgtagagcgttggcccggcatgcccgaataatga

SEQ ID NO: 770 - protein, 254 aa, Artificial Sequence; identical to SEQ ID NO: 766
  HHDH variant

SEQ ID NO: 771 - DNA, 768 bp, Artificial Sequence
  HHDH variant
  CDS (1)..(768)
atgagcaccgctattgtcaccaacgtcaagcattttggaggtatgggtagcgctctgcgtctgagcgaagctggtcataccgtcgcttgccatgatgaaagctttaagcatctggatgaactagaagcttttgctgaaacctacccacagctgataccaatcagcgaacaggaaccagctgaactgattgaagttgtcactagcgcccttggtcatgtcgatatcctggtcagcaacgatatcgcgcctgtggaatggcggccaatcgataaatacgctgtcgaggattacagggatactgtcgaagctctgcagatcaagccatttgctctagcaaatgccgtcgcttcgcaaatgaaggagcgaaagtcggggcacatcatcttcatcacttcggctgccccgttcgggccatggaaggagctatcgacttacgcatcggctcgagctgggaccagtgcactagctaatgctctatcgaaggagctaggagagtacaatatcccggtgttcgctatcgctccgaacgccctagactcgggggattcgccgtactattacccctctgagccgtggaagacttctccggagcacgtggctcacgtgcgtaagtacactgctctacaacgactagggactcaaaaagagttgggggaattggtgacgtttttggcatctggctcttgtgattatttgactggccaggtgtttaccttggcaggcggctttcccgttgtagagcgttggccctccgtgcccgaataatga

SEQ ID NO: 772 - protein, 254 aa, Artificial Sequence
  HHDH variant
MSTAIVTNVKHFGGMGSALRLSEAGHTVACHDESFKHLDELEAFAETYPQLIPISEQEPAELIEVVTSALGHVDILVSNDIAPVEWRPIDKYAVEDYRDTVEALQIKPFALANAVASQMKERKSGHIIFITSAAPFGPWKELSTYASARAGTSALANALSKELGEYNIPVFAIAPNALDSGDSPYYYPSEPWKTSPEHVAHVRKYTALQRLGTQKELGELVTFLASGSCDYLTGQVFTLAGGFPVVERWPSVPE

SEQ ID NO: 773 - DNA, 768 bp, Artificial Sequence
  HHDH variant
  CDS (1)..(768)
atgagcaccgctattgtcaccaacgtcaagcattttggaggtatgggtagcgctctgcgtctgagcgaagctggtcataccgtcgcttgccatgatgaaagctttaagcatctggatgaactagaagcttttgctgaaacctacccacagctgataccaatcagcgaacaggaaccagctgaactgattgaagctgtcactagcgcccttggtcatgtcgatatcctggtcagcaacgatatcgcgcctgtggaatggcggccaatcgataaatacgctgtcgaggattacaggggcatggtcgaagctctgcagatcaagccatttgctctagcaaatgccgtcgcttcgcaaatgaagcgtcgaaagtcggggcacatcatcttcatcacttcggctgcctcattcgggccatggaaggagctatcgacttacgcatcggctcgagctgggaccagtgcactagctaatgctctatcgaaggagctaggagagtacaatatcccggtgttcgctatcgctccgaacgccctagactcgggggattcgccgtactattacccctctgagccgtggaagacttctccggagcacgtggctcacgtgcgtaagtacactgctctacaacgactagggactcaaaaagagttgggggaattggtgacgtttttggcatctggctcttgtgattatttgactggccaggtgttttggttggcaggcggctttcccgttgtagagcgttggcccgaggtgcccgaataatga

SEQ ID NO: 774 - protein, 254 aa, Artificial Sequence
  HHDH variant
MSTAIVTNVKHFGGMGSALRLSEAGHTVACHDESFKHLDELEAFAETYPQLIPISEQEPAELIEAVTSALGHVDILVSNDIAPVEWRPIDKYAVEDYRGMVEALQIKPFALANAVASQMKRRKSGHIIFITSAASFGPWKELSTYASARAGTSALANALSKELGEYNIPVFAIAPNALDSGDSPYYYPSEPWKTSPEHVAHVRKYTALQRLGTQKELGELVTFLASGSCDYLTGQVFWLAGGFPVVERWPEVPE

SEQ ID NO: 775 - DNA, 768 bp, Artificial Sequence
  HHDH variant
  CDS (1)..(768)
atgagcaccgctattgtcaccaacgtcaagcattttggaggtatgggtagcgctctgcgtctgagcgaagctggtcataccgtcgcttgccatgatgaaagctttaagcatcaggatgagctagaagcttttgctgaaacctacccacagctgataccaatcagcgaacaggaaccagctgaactgattgaagctgtcactagcgcccttggtcatgtcgatatcctggtcagcaacgatatcgcgcctgtggaatggcggccaatcgataaatacgctgtcgaggattacagggatactgtcgaagctctgcagatcaagccatttgctctagcaaatgccgtcgcttcgcaaatgaagcgtcgaaagtcggggcacatcatcttcatcacttcggctgcctcattcgggccatggaaggagctatcgacttacgcatcggctcgagctgggaccagtgcactagctaatgctctatcgaaggagctaggagagtacaatatcccggtgttcgctatcgctccgaacgccctagactcgggggattcgccgtactattacccctctgagccgtggaagacttctccggagcacgtggctcacgtgcgtaaggtgactgctctacaacgactagggactcaaaaagagttgggggaattggtgacgtttttggcatctggctcttgtgattatttgactggccaggtgttttggttggcaggcggctttcccgttgtagagcgttggcccggcatgcccgaataatga

SEQ ID NO: 776 - protein, 254 aa, Artificial Sequence
  HHDH variant
MSTAIVTNVKHFGGMGSALRLSEAGHTVACHDESFKHQDELEAFAETYPQLIPISEQEPAELIEAVTSALGHVDILVSNDIAPVEWRPIDKYAVEDYRDTVEALQIKPFALANAVASQMKRRKSGHIIFITSAASFGPWKELSTYASARAGTSALANALSKELGEYNIPVFAIAPNALDSGDSPYYYPSEPWKTSPEHVAHVRKVTALQRLGTQKELGELVTFLASGSCDYLTGQVFWLAGGFPVVERWPGMPE

SEQ ID NO: 777 - DNA, 768 bp, Artificial Sequence
  HHDH variant
  CDS (1)..(768)
atgagcaccgctattgtcaccaacgtcaagcattttggaggtatgggtagcgctctgcgtctgagcgaagctggtcataccgtcgcttgccatgatgaaagctttaagcatctggatgaactagaagcttttgctgaaacctacccacagctgataccaatgagcgaacaggaaccagctgaactgattgaagctgtcactagcgcccttggtcatgtcgatatcctggtcagcaacgatatcgcgcctgtggaatggcggccaatcgataaatacgctgtcgaggattacagggatactgtcgaagctctgcagatcaagccatttgctctagcaaatgccgtcgcttcgcaaatgaagcgtcgaaagtcggggcacatcatcttcatcacttcggctgcctcattcgggccatggaaggagctatcgacttactcttcggctcgagctgggaccagtgcactagctaatgctctatcgaaggagctaggagagtacaatatcccggtgttcgctatcgctccgaacgccctagactcgggggattcgccgtactattacccctctgagccgtggaagacttctccggagcacgtggctcacgtgcgtaaggtgactgctctacaacgactagggactcaaaaagagttgggggaattggtgacgtttttggcatctggctcttgtgattatttgactggccaggtgtttaccttggcaggcggctttcccgttgtagagcgttggcccggcatgcccgaataatga

SEQ ID NO: 778 - protein, 254 aa, Artificial Sequence
  HHDH variant
MSTAIVTNVKHFGGMGSALRLSEAGHTVACHDESFKHLDELEAFAETYPQLIPMSEQEPAELIEAVTSALGHVDILVSNDIAPVEWRPIDKYAVEDYRDTVEALQIKPFALANAVASQMKRRKSGHIIFITSAASFGPWKELSTYSSARAGTSALANALSKELGEYNIPVFAIAPNALDSGDSPYYYPSEPWKTSPEHVAHVRKVTALQRLGTQKELGELVTFLASGSCDYLTGQVFTLAGGFPVVERWPGMPE

SEQ ID NO: 779 - DNA, 768 bp, Artificial Sequence
  HHDH variant
  CDS (1)..(768)
atgagcaccgctattgtcaccaacgtcaagcattttggaggtatgggtagcgctctgcgtctgagcgaagctggtcataccgtcgcttgccatgatgaaagctttaagcatcaggatgaactagaagcttttgctgaaacctacccacagctgataccaatgagcgaacaggaaccagctgaactgattgaagctgtcaatagcgcccttggtcatgtcgatatcctggtcagcaacgatatcgcgcctgtggaatggcggccaatcgataaatacgctgtcgaggattacagggacatggtcgaagctctgcagatcaagccatttgctctagcaaatgccgtcgcttcgcaaatgaaggagcgaaagtcggggcacatcatcttcatcacttcggctgcctcattcgggccatggaaggagctatcgacttactcttcggctcgagctgggaccagtgcactagctaatgctctatcgaaggagctaggagagtacaatatcccggtgttcgctatcgctccgaacgccctagactcgggggattcgccgtactattacccctctgagccgtggaagacttctccggagcacgtggctcacgtgcgtaagtacactgctctacaacgactagggactcaaaaagagttgggggaattggtgacgtttttggcatctggctcttgtgattatttgactggccaggtgttttggttggcaggcggctttcccgttgtagagcgttggcccggcatgcccgaataatga

SEQ ID NO: 780 - protein, 254 aa, Artificial Sequence
  HHDH variant
MSTAIVTNVKHFGGMGSALRLSEAGHTVACHDESFKHQDELEAFAETYPQLIPMSEQEPAELIEAVNSALGHVDILVSNDIAPVEWRPIDKYAVEDYRDMVEALQIKPFALANAVASQMKERKSGHIIFITSAASFGPWKELSTYSSARAGTSALANALSKELGEYNIPVFAIAPNALDSGDSPYYYPSEPWKTSPEHVAHVRKYTALQRLGTQKELGELVTFLASGSCDYLTGQVFWLAGGFPVVERWPGMPE

SEQ ID NO: 781 - DNA, 768 bp, Artificial Sequence
  HHDH variant
  CDS (1)..(768)
atgagcaccgctattgtcaccaacgtcaagcattttggaggtatgggtagcgctatgcgtctgagcgaagctggtcataccgtcgcttgccatgatgaaagctttaagcatcaggatgaactagaagcttttgctgaaacctacccacagctgataccaatcagcgaacaggaaccagctgaactgattgaagctgtcaatagcgcccttggtcatgtcgatatcctggtcagcaacgatatcgcgcctgtggaatggcggccaatcgataaatacgctgtcgaggattacagggatactgtcgaagctctgcagatcaagccatttgctctagcaaatgccgtcgcttcgcaaatgaaggatcgaaagtcggggcacatcatcttcatcacttcggctgcctcattcgggccatggaaggagctatcgacttacgcatcggctcgagctgggaccagtgcactagctaatgctctatcgaaggagctaggagagtacaatatcccggtgttcgctatcgctccgaacgccctagactcgggggattcgccgtactattacccctctgagccgtggaagacttctccggagcacgtggctcacgtgcgtaaggtgactgctctacaacgactagggactcaaaaagagttgggggaattggtgacgtttttggcatctggctcttgtgattatttgactggccaggtgttttgtttggcaggcggctttcccgttgtagagcgttggcccggcatgcccgaataatga

SEQ ID NO: 782 - protein, 254 aa, Artificial Sequence
  HHDH variant
MSTAIVTNVKHFGGMGSAMRLSEAGHTVACHDESFKHQDELEAFAETYPQLIPISEQEPAELIEAVNSALGHVDILVSNDIAPVEWRPIDKYAVEDYRDTVEALQIKPFALANAVASQMKDRKSGHIIFITSAASFGPWKELSTYASARAGTSALANALSKELGEYNIPVFAIAPNALDSGDSPYYYPSEPWKTSPEHVAHVRKVTALQRLGTQKELGELVTFLASGSCDYLTGQVFCLAGGFPVVERWPGMPE

SEQ ID NO: 783 - DNA, 768 bp, Artificial Sequence
  HHDH variant
  CDS (1)..(768)
atgagcaccgctattgtcaccaacgtcaagcattttggaggtatgggtagcgctctgcgtatgagcgaagctggtcataccgtcgcttgccatgatgaaagctttaagcatctggatgaactagaagcttttgctgaaacctacccacagctgataccaatcagcgaacaggaaccagctgaactgattgaagctgtcaatagcgcccttggtcatgtcgatatcctggtcagcaacgatatcgcgcctgtggaatggcggccaatcgataaatacgctgtcgaggattacaggggcatggtcgaagctctgcagatcaagccatttgctctagcaaatgccgtcgcttcgcaaatgaagcgtcgaaagtcggggcacatcatcttcatcacttcggctgccccgttcgggccatggaaggagctatcgacttactcttcggctcgagctgggaccagtgcactagctaatgctctatcgaaggagctaggagagtacaatatcccggtgttcgctatcgctccgaacgccctagactcgggggattcgccgtactattacccctctgagccgtggaagacttctccggagcacgtggctcacgtgcgtaagtacactgctctacaacgactagggactcaaaaagagttgggggaattggtgacgtttttggcatctggctcttgtgattatttgactggccaggtgttttgtttggcaggcggctttcccgttgtagagcgttggcccgagatgcccgaataatga

SEQ ID NO: 784 - protein, 254 aa, Artificial Sequence
  HHDH variant
MSTAIVTNVKHFGGMGSALRMSEAGHTVACHDESFKHLDELEAFAETYPQLIPISEQEPAELIEAVNSALGHVDILVSNDIAPVEWRPIDKYAVEDYRGMVEALQIKPFALANAVASQMKRRKSGHIIFITSAAPFGPWKELSTYSSARAGTSALANALSKELGEYNIPVFAIAPNALDSGDSPYYYPSEPWKTSPEHVAHVRKYTALQRLGTQKELGELVTFLASGSCDYLTGQVFCLAGGFPVVERWPEMPE

SEQ ID NO: 785 - DNA, 768 bp, Artificial Sequence
  HHDH variant
  CDS (1)..(768)
atgagcaccgctattgtcaccaacgtcaagcattttggaggtatgggtagcgctctgcgtctgagcgaagctggtcataccgtcgcttgccatgatgaaagctttaagcatcaggatgaactagaagcttttgctgaaacctacccacagctgataccaatcagcgaacaggaaccagctgaactgattgaagctgtcactagcgcccttggtcatgtcgatatcctggtcagcaacgatatcgcgcctgtggaatggcggccaatcgataaatacgctgtcgaggattacaggggcacggtcgaagctctgcagatcaagccatttgctctagcaaatgccgtcgcttcgcaaatgaaggagcgaaagtcggggcacatcatcttcatcacttcggctgccccgttcgggccatggaaggagctatcgacttactcttcggctcgagctgggaccagtgcactagctaatgctctatcgaaggagctaggagagtacaatatcccggtgttcgctatcgctccgaacgccctagactcgggggattcgccgtactattacccctctgagccgtggaagacttctccggagcacgtggctcacgtgcgtaagtacactgctctacaacgactagggactcaaaaagagttgggggaattggtgacgtttttggcatctggctcttgtgattatttgactggccaggtgtttaccttggcaggcggctttcccgttgtagagcgttggcccggcatgcccgaataatga

SEQ ID NO: 786 - protein, 254 aa, Artificial Sequence
  HHDH variant
MSTAIVTNVKHFGGMGSALRLSEAGHTVACHDESFKHQDELEAFAETYPQLIPISEQEPAELIEAVTSALGHVDILVSNDIAPVEWRPIDKYAVEDYRGTVEALQIKPFALANAVASQMKERKSGHIIFITSAAPFGPWKELSTYSSARAGTSALANALSKELGEYNIPVFAIAPNALDSGDSPYYYPSEPWKTSPEHVAHVRKYTALQRLGTQKELGELVTFLASGSCDYLTGQVFTLAGGFPVVERWPGMPE

SEQ ID NO: 787 - DNA, 768 bp, Artificial Sequence
  HHDH variant
  CDS (1)..(768)
atgagcaccgctattgtcaccaacgtcaagcattttggaggtatgggtagcgctctgcgtctgagcgaagctggtcataccgtcgcttgccatgatgaaagctttaagcatcaggatgaactagaagcttttgctgaaacctacccacagctgataccaatgagcgaacaggaaccagctgaactgattgaagctgtcactagcgcccttggtcatgtcgatatcctggtcagcaacgatatcgcgcctgtggaatggcggccaatcgataaatacgctgtcgaggattacagggatactgtcgaagctctgcagatcaagccatttgctctagcaaatgccgtcgcttcgcaaatgaagcgtcgaaagtcggggcacatcatcttcatcacttcggctgccccgttcgggccatggaaggagctatcgacttacgcatcggctcgagctggggcgagtgcactagctaatgctctatcgaaggagctaggagagtacaatatcccggtgttcgctatcgctccgaacgccctagactcgggggattcgccgtactattacccctctgagccgtggaagacttctccggagcacgtggctcacgtgcgtaaggtgactgctctacaacgactagggactcaaaaagagttgggggaattggtgacgtttttggcatctggctcttgtgattatttgactggccaggtgtttaccttggcaggcggctttcccgttgtagagcgttggccctccatgcccgaataatga

SEQ ID NO: 788 - protein, 254 aa, Artificial Sequence
  HHDH variant
MSTAIVTNVKHFGGMGSALRLSEAGHTVACHDESFKHQDELEAFAETYPQLIPMSEQEPAELIEAVTSALGHVDILVSNDIAPVEWRPIDKYAVEDYRDTVEALQIKPFALANAVASQMKRRKSGHIIFITSAAPFGPWKELSTYASARAGASALANALSKELGEYNIPVFAIAPNALDSGDSPYYYPSEPWKTSPEHVAHVRKVTALQRLGTQKELGELVTFLASGSCDYLTGQVFTLAGGFPVVERWPSMPE

SEQ ID NO: 789 - DNA, 768 bp, Artificial Sequence
  HHDH variant
  CDS (1)..(768)
atgagcaccgctattgtcaccaacgtcaagcattttggaggtatgggtagcgctctgcgtctgagcgaagctggtcataccgtcgcttgccatgatgaaagctttaagcatctggatgaactagaagcttttgctgaaacctacccacagctgataccaatcagcgaacaggaaccagctgaactgattgaagctgtcactagcgcccttggtcatgtcgatatcctggtcagcaacgatatcgcgcctgtggaatggcggccaatcgataaatacgctgtcgaggattacaggggcacggtcgaagctctgcagatcaagccatttgctctagcaaatgccgtcgcttcgcaaatgaaggagcgaaagtcggggcacatcatcttcatcacttcggctgccccgttcgggccatggaaggagctatcgacttactcttcggctcgagctgggaccagtgcactagctaatgctctatcgaaggagctaggagagtacaatatcccggtgttcgctatcgctccgaacgccctagactcgggggattcgccgtactattacccctctgagccgtggaagacttctccggagcacgtggctcacgtgcgtaagtacactgctctacaacgactagggactcaaaaagagttgggggaattggtgacgtttttggcatctggctcttgtgattatttgactggccaggtgtttaccttggcaggcggctttcccgttgtagagcgttggccctccatgcccgaataatga

SEQ ID NO: 790 - protein, 254 aa, Artificial Sequence
  HHDH variant
MSTAIVTNVKHFGGMGSALRLSEAGHTVACHDESFKHLDELEAFAETYPQLIPISEQEPAELIEAVTSALGHVDILVSNDIAPVEWRPIDKYAVEDYRGTVEALQIKPFALANAVASQMKERKSGHIIFITSAAPFGPWKELSTYSSARAGTSALANALSKELGEYNIPVFAIAPNALDSGDSPYYYPSEPWKTSPEHVAHVRKYTALQRLGTQKELGELVTFLASGSCDYLTGQVFTLAGGFPVVERWPSMPE

SEQ ID NO: 791 - DNA, 768 bp, Artificial Sequence
  HHDH variant
  CDS (1)..(768)
atgagcaccgctattgtcaccaacgtcaagcattttggaggtatgggtagcgctctgcgtctgagcgaagctggtcataccgtcgcttgccatgatgaaagctttaagcatctggatgaactagaagcttttgctgaaacctacccacagctgataccaatcagcgaacaggaaccagctgaactgattgaagctgtcaatagcgcccttggtcatgtcgatatcctggtcagcaacgatatcgcgcctgtggaatggcggccaatcgataaatacgctgtcgaggattacagggatactgtcgaagctctgcagatcaagccatttgctctagcaagtgccgtcgcttcgcaaatgaaggagcgaaagtcggggcacatcatcttcatcacttcggctgcctcattcgggccatggaaggagctatcgacttactcttcggctcgagctgggaccagtgcactagctaatgctctatcgaaggagctaggagagtacaatatcccggtgttcgctatcgctccgaacgccctagactcgggggattcgccgtactattacccctctgagccgtggaagacttctccggagcacgtggctcacgtgcgtaagtacactgctctacaacgactagggactcaaaaagagttgggggaattggtgacgtttttggcatctggctcttgtgattatttgactggccaggtgtttaccttggcaggcggctttcccgttgtagagcgttggcccggcatgcccgaataatga

SEQ ID NO: 792 - protein, 254 aa, Artificial Sequence
  HHDH variant
MSTAIVTNVKHFGGMGSALRLSEAGHTVACHDESFKHLDELEAFAETYPQLIPISEQEPAELIEAVNSALGHVDILVSNDIAPVEWRPIDKYAVEDYRDTVEALQIKPFALASAVASQMKERKSGHIIFITSAASFGPWKELSTYSSARAGTSALANALSKELGEYNIPVFAIAPNALDSGDSPYYYPSEPWKTSPEHVAHVRKYTALQRLGTQKELGELVTFLASGSCDYLTGQVFTLAGGFPVVERWPGMPE

SEQ ID NO: 793 - DNA, 768 bp, Artificial Sequence
  HHDH variant
  CDS (1)..(768)
atgagcaccgctattgtcaccaacgtcaagcattttggaggtatgggtagcgctctgcgtctgagcgaagctggtcataccgtcgcttgccatgatgaaagctttaagcatctggatgaactagaagcttttgctgaaacctacccacagctgataccaatcagcgaacaggaaccagctgaactgattgaagctgtcactagcgcccttggtcatgtcgatatcctggtcagcaacgatatcgcgcctgtggaatggcggccaatcgataaatacgctgtcgaggattacaggggcacggtcgaagctctgcagatcaagccatttgctctagcaaatgccgtcgcttcgcaaatgaagcgtcgaaagtcggggcacatcatcttcatcacttcggctgcctcattcgggccatggaaggagctatcgacttactcttcggctcgagctggggcgagtgcactagctaatgctctatcgaaggagctaggagagtacaatatcccggtgttcgctatcgctccgaacgccctagactcgggggattcgccgtactattacccctctgagccgtggaagacttctccggagcacgtggctcacgtgcgtaaggtgactgctctacaacgactagggactcaaaaagagttgggggaattggtgacgtttttggcatctggctcttgtgattatttgactggccaggtgttttgtttggcaggcggctttcccgttgtagagcgttggcccggcatgcccgaataatga

SEQ ID NO: 794 - protein, 254 aa, Artificial Sequence
  HHDH variant
MSTAIVTNVKHFGGMGSALRLSEAGHTVACHDESFKHLDELEAFAETYPQLIPISEQEPAELIEAVTSALGHVDILVSNDIAPVEWRPIDKYAVEDYRGTVEALQIKPFALANAVASQMKRRKSGHIIFITSAASFGPWKELSTYSSARAGASALANALSKELGEYNIPVFAIAPNALDSGDSPYYYPSEPWKTSPEHVAHVRKVTALQRLGTQKELGELVTFLASGSCDYLTGQVFCLAGGFPVVERWPGMPE

SEQ ID NO: 795 - DNA, 768 bp, Artificial Sequence
  Variant HHDH
  CDS (1)..(768)
atgagcaccgctattgtcaccaacgtcaagcattttggaggtatgggtagcgctctgcgtctgagcgaagctggtcataccgtcgcttgccatgatgaaagctttaagcatctggatgaactagaagcttttgctgaaacctacccacagctgataccaatgagcgaacaggaaccagctgaactgattgaagctgtcactagcgcccttggtcatgtcgatatcctggtcagcaacgatatcgcgcctgtggaatggcggccaatcgataaatacgctgtcgaggattacaggggcatggtcgaagctctgcagatcaagccatttgctctagcaaatgccgtcgcttcgcaaatgaaggagcgaaagtcggggcacatcatcttcatcacttcggctgcctcattcgggccatggaaggagctatcgacttactcttcggctcgagctgggaccagtgcactagctaatgctctatcgaaggagctaggagagtacaatatcccggtgttcgctatcgctccgaacgccctagactcgggggattcgccgtactattacccctctgagccgtggaagacttctccggagcacgtggctcacgtgcgtaaggtgactgctctacaacgactagggactcaaaaagagttgggggaattggtgacgtttttggcatctggctcttgtgattatttgactggccaggtgtttaccttggcaggcggctttcccgttgtagagcgttggcccgggatgcccgaataatga

SEQ ID NO: 796 - protein, 254 aa, Artificial Sequence
  Variant HHDH
MSTAIVTNVKHFGGMGSALRLSEAGHTVACHDESFKHLDELEAFAETYPQLIPMSEQEPAELIEAVTSALGHVDILVSNDIAPVEWRPIDKYAVEDYRGMVEALQIKPFALANAVASQMKERKSGHIIFITSAASFGPWKELSTYSSARAGTSALANALSKELGEYNIPVFAIAPNALDSGDSPYYYPSEPWKTSPEHVAHVRKVTALQRLGTQKELGELVTFLASGSCDYLTGQVFTLAGGFPVVERWPGMPE

SEQ ID NO: 797 - DNA, 768 bp, Artificial Sequence
  HHDH variant
  CDS (1)..(768)
atgagcaccgctattgtctccaacgtcaagcattttggaggtatgggtagcgctatgcgtctgagcgaagctggtcataccgtcgcttgccatgatgaaagctttaagcatctggatgaactagaagcttttgctgaaacctacccacagctgataccaatcagcgaacaggaaccagctgaactgattgaagctgtcaatagcgcccttggtcatgtcgatatcctggtcagcaacgatatcgcgcctgtggaatggcggccaatcgataaatacgctgtcgaggattacagggatactgtcgaagctctgcagatcaagccatttgctctagcaaatgccgtcgcttcgcaaatgaaggatcgaaagtcggggcacatcatcttcatcacttcggctgcctcattcgggccatggaaggagctatcgacttacgcatcggctcgagctggggcgagtgcactagctaatgctctatcgaaggagctaggagagtacaatatcccggtgttcgctatcgctccgaacgccctagactcgggggattcgccgtactattacccctctgagccgtggaagacttctccggagcacgtggctcacgtgcgtaaggtgactgctctacaacgactagggactcaaaaagagttgggggaattggtgacgtttttggcatctggctcttgtgattatttgactggccaggtgtttaccttggcaggcggctttcccgttgtagagcgttggccctccgtgcccgaataatga

SEQ ID NO: 798 - protein, 254 aa, Artificial Sequence
  HHDH variant
MSTAIVSNVKHFGGMGSAMRLSEAGHTVACHDESFKHLDELEAFAETYPQLIPISEQEPAELIEAVNSALGHVDILVSNDIAPVEWRPIDKYAVEDYRDTVEALQIKPFALANAVASQMKDRKSGHIIFITSAASFGPWKELSTYASARAGASALANALSKELGEYNIPVFAIAPNALDSGDSPYYYPSEPWKTSPEHVAHVRKVTALQRLGTQKELGELVTFLASGSCDYLTGQVFTLAGGFPVVERWPSVPE

SEQ ID NO: 799 - DNA, 768 bp, Artificial Sequence
  HHDH variant
  CDS (1)..(768)
atgagcaccgctattgtcaccaacgtcaagcattttggaggtatgggtagcgctctgcgtctgagcgaagctggtcataccgtcgcttgccatgatgaaagctttaagcatctggatgaactagaagcttttgctgaaacctacccacagctgataccaatgagcgaacaggaaccagctgaactgattgaagctgtcactagcgcccttggtcatgtcgatatcctggtcagcaacgatatcgcgcctgtggaatggcggccaatcgataaatacgctgtcgaggattacagggatactgtcgaagctctgcagatcaagccatttgctctagcaaatgccgtcgcttcgcaaatgaagcgtcgaaagtcggggcacatcatcttcatcacttcggctgcctcattcgggccatggaaggagctatcgacttacgcatcggctcgagctgggaccagtgcactagctaatgctctatcgaaggagctaggagagtacaatatcccggtgttcgctatcgctccgaacgccctagactcgggggattcgccgtactattacccctctgagccgtggaagacttctccggagcacgtggctcacgtgcgtaagtacactgctctacaacgactagggactcaaaaagagttgggggaattggtgacgtttttggcatctggctcttgtgattatttgactggccaggtgtttaccttggcaggcggctttcccgttgtagagcgttggccctccatgcccgaataatga

SEQ ID NO: 800 - protein, 254 aa, Artificial Sequence
  HHDH variant
MSTAIVTNVKHFGGMGSALRLSEAGHTVACHDESFKHLDELEAFAETYPQLIPMSEQEPAELIEAVTSALGHVDILVSNDIAPVEWRPIDKYAVEDYRDTVEALQIKPFALANAVASQMKRRKSGHIIFITSAASFGPWKELSTYASARAGTSALANALSKELGEYNIPVFAIAPNALDSGDSPYYYPSEPWKTSPEHVAHVRKYTALQRLGTQKELGELVTFLASGSCDYLTGQVFTLAGGFPVVERWPSMPE

SEQ ID NO: 801 - DNA, 768 bp, Artificial Sequence
  HHDH variant
  CDS (1)..(768)
atgagcaccgctattgtcaccaacgtcaagcattttggaggtatgggtagcgctctgcgtctgagcgaagctggtcataccgtcgcttgccatgatgaaagctttaagcatctggatgaactagaagcttttgctgaaacctacccacagctgataccaatcagcgaacaggaaccagctgaactgattgaagctgtcactagcgcccttggtcatgtcgatatcctggtcagcaacgatatcgcgcctgtggaatggcggccaatcgataaatacgctgtcgaggattacagggacacggtcgaagctctgcagatcaagccatttgctctagcaaatgccgtcgcttcgcaaatgaagcgtcgaaagtcggggcacatcatcttcatcacttcggctgcctcattcgggccatggaaggagctatcgacttactcttcggctcgagctgggaccagtgcactagctaatgctctatcgaaggagctaggagagtacaatatcccggtgttcgctatcgctccgaacgccctagacacgggggattcgccgtactattacccctctgagccgtggaagacttctccggagcacgtggctcacgtgcgtaagtacactgctctacaacggctagggactcaaaaagagttgggggaattggtgacgtttttggcatctggctcttgtgattatttgactggccaggtgtttaccttggcaggcggctttcccgttgtagagcgttggcccgagatgcccgaataatga

SEQ ID NO: 802 - protein, 254 aa, Artificial Sequence
  HHDH variant
MSTAIVTNVKHFGGMGSALRLSEAGHTVACHDESFKHLDELEAFAETYPQLIPISEQEPAELIEAVTSALGHVDILVSNDIAPVEWRPIDKYAVEDYRDTVEALQIKPFALANAVASQMKRRKSGHIIFITSAASFGPWKELSTYSSARAGTSALANALSKELGEYNIPVFAIAPNALDTGDSPYYYPSEPWKTSPEHVAHVRKYTALQRLGTQKELGELVTFLASGSCDYLTGQVFTLAGGFPVVERWPEMPE

SEQ ID NO: 803 - DNA, 768 bp, Artificial Sequence
  HHDH variant
  CDS (1)..(768)
atgagcaccgctattgtcaccaacgtcaagcattttggaggtatgggtagcgctctgcgtctgagcgaagctggtcataccgtcgcttgccatgatgaaagctttaagcatctggatgaactagaagcttttgctgaaacctacccacagctgataccaatcagcgaacaggaaccagctgaactgattgaagctgtcactagcgcccttggtcatgtcgatatcctggtcagcaacgatatcgcgcctgtggaatggcggccaatcgataaatacgctgtcgaggattacagggatactgtcgaagctctgcagatcaagccatttgctctagcaaatgccgtcgcttcgcaaatgaaggagcgaaagtcggggcacatcatcttcatcacctcggctgccccgttcgggccatggaaggagctatcgacttacgcatcggctcgagctgggaccagtgcactagctaatgctctatcgaaggagctaggagagtacaatatcccggtgttcgctatcgctccgaacgccctagactcgggggattcgccgtactattacccctctgagccgtggaagacttctccggagcacgtggctcacgtgcgtaaggtgactgctctacaacgactagggactcaaaaagagttgggggaattggtgacgtttttggcatctggctcttgtgattatttgactggccaggtgtttaccttggcaggcggctttcccgttgtagagcgttggcccggcatgcccgaataatga

SEQ ID NO: 804 - protein, 254 aa, Artificial Sequence
  HHDH variant
MSTAIVTNVKHFGGMGSALRLSEAGHTVACHDESFKHLDELEAFAETYPQLIPISEQEPAELIEAVTSALGHVDILVSNDIAPVEWRPIDKYAVEDYRDTVEALQIKPFALANAVASQMKERKSGHIIFITSAAPFGPWKELSTYASARAGTSALANALSKELGEYNIPVFAIAPNALDSGDSPYYYPSEPWKTSPEHVAHVRKVTALQRLGTQKELGELVTFLASGSCDYLTGQVFTLAGGFPVVERWPGMPE

SEQ ID NO: 805 - DNA, 768 bp, Artificial Sequence
  HHDH variant
  CDS (1)..(768)
atgagcaccgctattgtcaccaacgtcaagcattttggaggtatgggtagcgctctgcgtctgagcgaagctggtcataccgtcgcttgccatgatgaaagctttaagcatctggatgaactagaagcttttgctgaaacctacccacagctgataccaatgagcgaacaggaaccagctgaactgattgaagctgtcactagcgcccttggtcatgtcgatatcctggtcagcaacgatatcgcgcctgtggaatggcggccaatcgataaatacgctgtcgaggattacaggggtatggtcgaagctctgcagatcaagccatttgctctagcaaatgccgtcgcttcgcaaatgaagcgtcgaaagtcggggcacatcatcttcatcacttcggctgccccgttcgggccatggaaggagctatcgacttacgcatcggctcgagctgggaccagtgcactagctaatgctctatcgaaggagctaggagagtacaatatcccggtgttcgctatcgctccgaacgccctagactcgggggattcgccgtactattacccctctgagccgtggaagacttctccggagcacgtggctcacgtgcgtaagtacactgctctacaacgactagggactcaaaaagagttgggggaattggtgacgtttttggcatctggctcttgtgattatttgactggccaggtgttttggttggcaggcggctttcccgttgtagagcgttggcccgagatgcccgaataatga

SEQ ID NO: 806 - protein, 254 aa, Artificial Sequence
  HHDH variant
MSTAIVTNVKHFGGMGSALRLSEAGHTVACHDESFKHLDELEAFAETYPQLIPMSEQEPAELIEAVTSALGHVDILVSNDIAPVEWRPIDKYAVEDYRGMVEALQIKPFALANAVASQMKRRKSGHIIFITSAAPFGPWKELSTYASARAGTSALANALSKELGEYNIPVFAIAPNALDSGDSPYYYPSEPWKTSPEHVAHVRKYTALQRLGTQKELGELVTFLASGSCDYLTGQVFWLAGGFPVVERWPEMPE

SEQ ID NO: 807 - DNA, 768 bp, Artificial Sequence
  HHDH variant
  CDS (1)..(768)
atgagcaccgctattgtcaccaacgtcaagcattttggaggtatgggtagcgctctgcgtctgagcgaagctggtcataccgtcgcttgccatgatgaaagctttaagcatcaggatgaactagaagcttttgctgaaacctacccacagctgatacctatcagcgaacaggaaccagctgaactgattgaagctgtcactagcgcccttggtcatgtcgatatcctggtcagcaacgatatcgcgcctgtggaatggcggccaatcgataaatacgctgtcgaggattacaggggcatggtcgaagctctgcagatcaagccatttgctctagcaaatgccgtcgcttcgcaaatgaaggagcgaaagtcggggcacatcatcttcatcacttcggctgcctcattcgggccatggaaggagctatcgacttacgcatcggctcgagctgggaccagtgcactagctaatgctctatcgaaggagctaggagagtacaatatcccggtgttcgctatcgctccgaacgccctagacacgggggattcgccgtactattacccctctgagccgtggaagacttctccggagcacgtggctcacgtgcgtaaggtgactgctctacaacgactagggactcaaaaagagttgggggaattggtgacgtttttggcatctggctcttgtgattatttgactggccaggtgttttggttggcaggcggctttcccgttgtagagcgttggcccggcatgcccgaataatga

SEQ ID NO: 808 - protein, 254 aa, Artificial Sequence
  HHDH variant
MSTAIVTNVKHFGGMGSALRLSEAGHTVACHDESFKHQDELEAFAETYPQLIPISEQEPAELIEAVTSALGHVDILVSNDIAPVEWRPIDKYAVEDYRGMVEALQIKPFALANAVASQMKERKSGHIIFITSAASFGPWKELSTYASARAGTSALANALSKELGEYNIPVFAIAPNALDTGDSPYYYPSEPWKTSPEHVAHVRKVTALQRLGTQKELGELVTFLASGSCDYLTGQVFWLAGGFPVVERWPGMPE

SEQ ID NO: 809 - DNA, 768 bp, Artificial Sequence
  HHDH variant
  CDS (1)..(768)
atgagcaccgctattgtcaccaacgtcaagcattttggaggtatgggtagcgctctgcgtctgagcgaagctggtcataccgtcgcttgccatgatgaaagctttaagcatctggatgaactagaagcttttgctgaaacctacccacagctgataccaatgagcgaacaggaaccagctgaactgattgaagctgtcactagcgcccttggtcatgtcgatatcctggtcagcaacgatatcgcgcctgtggaatggcggccaatcgataaatacgctgtcgaggattacaggggcatggtcgaagctctgcagatcaagccatttgctctagcaaatgccgtcgcttcgcaaatgaaggagcgaaagtcggggcacatcatcttcatcacttcggctgccccgttcgggccatggaaggagctatcgacttactcttcggctcgagctgggaccagtgcactagctaatgctctatcgaaggagctaggagagtacaatatcccggtgttcgctatcgctccgaacgccctagactcgggggattcgccgtactattacccctctgagccgtggaagacttctccggagcacgtggctcacgtgcgtaagtacactgctctacaacgactagggactcaaaaagagttgggggaattggtgacgtttttggcatctggctcttgtgattatttgactggccaggtgtttaccttggcaggcggctttcccgttgtagagcgttggccctccgtgcccgaataatga

SEQ ID NO: 810 - protein, 254 aa, Artificial Sequence
  HHDH variant
MSTAIVTNVKHFGGMGSALRLSEAGHTVACHDESFKHLDELEAFAETYPQLIPMSEQEPAELIEAVTSALGHVDILVSNDIAPVEWRPIDKYAVEDYRGMVEALQIKPFALANAVASQMKERKSGHIIFITSAAPFGPWKELSTYSSARAGTSALANALSKELGEYNIPVFAIAPNALDSGDSPYYYPSEPWKTSPEHVAHVRKYTALQRLGTQKELGELVTFLASGSCDYLTGQVFTLAGGFPVVERWPSVPE

SEQ ID NO: 811 - DNA, 768 bp, Artificial Sequence
  HHDH variant
  CDS (1)..(768)
atgagcaccgctattgtcaccaacgtcaagcattttggaggtatgggtagcgctctgcctctgagcgaagctggtcataccgtcgcttgccatgatgaaagctttaagcatctggatgaactagaagcttttgctgaaacctacccacagctgataccaatcagcgaacaggaaccagctgaactgattgaagctgtcactagcgcccttggtcatgtcgatatcctggtcagcaacgatatcgcgcctgtggaatggcggccaatcgataaatacgctgtcgaggattacagggatactgtcgaagctctgcagatcaagccatttgctctagcaaatgccgtcgcttcgcaaatgaaggatcgaaagtcggggcacatcatcttcatcacttcggctgccccgttcgggccatggaaggagctatcgacttacgcatcggctcgagctgggaccagtgcactagctaatgctctatcgaaggagctaggagagtacaatatcccggtgttcgctatcgctccgaacgccctagactcgggggattcgccgtactattacccctctgagccgtggaagacttctccggagcacgtggctcacgtgcgtaagtacactgctctacaacgactagggactcaaaaagagttgggggaattggtgacgtttttggcatctggctcttgtgattatttgactggccaggtgtttaccttggcaggcggctttcccgttgtagagcgttggcccggcatgcccgaataatga

SEQ ID NO: 812 - protein, 254 aa, Artificial Sequence
  HHDH variant
MSTAIVTNVKHFGGMGSALPLSEAGHTVACHDESFKHLDELEAFAETYPQLIPISEQEPAELIEAVTSALGHVDILVSNDIAPVEWRPIDKYAVEDYRDTVEALQIKPFALANAVASQMKDRKSGHIIFITSAAPFGPWKELSTYASARAGTSALANALSKELGEYNIPVFAIAPNALDSGDSPYYYPSEPWKTSPEHVAHVRKYTALQRLGTQKELGELVTFLASGSCDYLTGQVFTLAGGFPVVERWPGMPE

SEQ ID NO: 813 - DNA, 768 bp, Artificial Sequence
  HHDH variant
  CDS (1)..(768)
atgagcaccgctattgtcaccaacgtcaagcattttggaggtatgggtagcgctctgcgtctgagcgaagctggtcataccgtcgcttgccatgatgaaagctttaagcatctggatgaactagaagcttttgctgaaacctacccacagctgataccaatgagcgaacaggaaccagctgaactgattgaagctgtcactagcgcccttggtcatgtcgatatcctggtcagcaacgatatcgcgcctgtggaatggcggccaatcgataaatacgctgtcgaggattacaggggcatggtcgaagctctgcagatcaagccatttgctctagcaaatgccgtcgcttcgcaaatgaaggagcgaaagtcggggcacatcatcttcatcacttcggctgccccgttcgggccatggaaggagctatcgacttacgcatcggctcgagctgggaccagtgcactagctaatgctctatcgaaggagctaggagagtacaatatcccggtgttcgctatcgctccgaacgccctagactcgggggattcgccgtactattacccctctgagccgtggaagacttctccggagcacgtggctcacgtgcgtaaggtgactgctctacaacgactagggactcaaaaagagttgggggaattggtgacgtttttggcatctggctcttgtgattatttgactggccaggtgttttggttggcaggcggctttcccgttgtagagcgttggcccggcatgcccgaataatga

SEQ ID NO: 814 - protein, 254 aa, Artificial Sequence
  HHDH variant
MSTAIVTNVKHFGGMGSALRLSEAGHTVACHDESFKHLDELEAFAETYPQLIPMSEQEPAELIEAVTSALGHVDILVSNDIAPVEWRPIDKYAVEDYRGMVEALQIKPFALANAVASQMKERKSGHIIFITSAAPFGPWKELSTYASARAGTSALANALSKELGEYNIPVFAIAPNALDSGDSPYYYPSEPWKTSPEHVAHVRKVTALQRLGTQKELGELVTFLASGSCDYLTGQVFWLAGGFPVVERWPGMPE

SEQ ID NO: 815 - DNA, 768 bp, Artificial Sequence
  HHDH variant
  CDS (1)..(768)
atgagcaccgctattgtcaccaacgtcaagcattttggaggtatgggtagcgctctgcgtctgagcgaagctggtcataccgtcgcttgccatgatgaaagctttaagcatctggatgaactagaagcttttgctgaaacctacccacagctgataccaatgagcgaacaggaaccagctgaactgattgaagctgtcactagcgcccttggtcatgtcgatatcctggtcagcaacgatatcgcgcctgtggaatggcggccaatcgataaatacgctgtcgaggattacagggacacggtcgaagctctgcagatcaagccatttgctctagcaaatgccgtcgcttcgcaaatgaagcgtcgaaagtcggggcacatcatcttcatcacttcggctgcctcattcgggccatggaaggagctatcgacttactcttcggctcgagctggggcgagtgcactagctaatgctctatcgaaggagctaggagagtacaatatcccggtgttcgctatcgctccgaacgccctagactcgggggattcgccgtactattacccctctgagccgtggaagacttctccggagcacgtggctcacgtgcgtaaggtgactgctctacaacgactagggactcaaaaagagttgggggaattggtgacgtttttggcatctggctcttgtgattatttgactggccaggtgttttggttggcaggcggctttcccgttgtagagcgttggcccggggtgcccgaataatga

SEQ ID NO: 816 - protein, 254 aa, Artificial Sequence
  HHDH variant
MSTAIVTNVKHFGGMGSALRLSEAGHTVACHDESFKHLDELEAFAETYPQLIPMSEQEPAELIEAVTSALGHVDILVSNDIAPVEWRPIDKYAVEDYRDTVEALQIKPFALANAVASQMKRRKSGHIIFITSAASFGPWKELSTYSSARAGASALANALSKELGEYNIPVFAIAPNALDSGDSPYYYPSEPWKTSPEHVAHVRKVTALQRLGTQKELGELVTFLASGSCDYLTGQVFWLAGGFPVVERWPGVPE

SEQ ID NO: 817 - DNA, 768 bp, Artificial Sequence
  HHDH variant
  CDS (1)..(768)
atgagcaccgctattgtcaccaacgtcaagcattttggaggtatgggtagcgctctgcgtctgagcgaagctggtcataccgtcgcttgccatgatgaaagctttaagcatcaggatgaactagaagcttttgctgaaacctacccacagctgataccaatgagcgaacaggaaccagctgaactgattgaagctgtcactagcgcccttggtcatgtcgatatcctggtcagcaacgatatcgcgcctgtggaatggcggccaatcgataaatacgctgtcgaggattacagggacacggtcgaagctctgcagatcaagccatttgctctagcaaatgccgtcgcttcgcaaatgaagcgtcgaaagtcggggcacatcatcttcatcacttcggctgccccgttcgggccatggaaggagctatcgacttactcttcggctcgagctgggaccagtgcactagctaatgctctatcgaaggagctaggagagtacaatatcccggtgttcgctatcgctccgaacgccctagactcgggggattcgccgtactattacccctctgagccgtggaagacttctccggagcacgtggctcacgtgcgtaaggtgactgctctacaacgactagggactcaaaaagagttgggggaattggtgacgtttttggcatctggctcttgtgattatttgactggccaggtgttttgtttggcaggcggctttcccgttgtagagcgttggccctccgtgcccgaataatga

SEQ ID NO: 818 - protein, 254 aa, Artificial Sequence
  HHDH variant
MSTAIVTNVKHFGGMGSALRLSEAGHTVACHDESFKHQDELEAFAETYPQLIPMSEQEPAELIEAVTSALGHVDILVSNDIAPVEWRPIDKYAVEDYRDTVEALQIKPFALANAVASQMKRRKSGHIIFITSAAPFGPWKELSTYSSARAGTSALANALSKELGEYNIPVFAIAPNALDSGDSPYYYPSEPWKTSPEHVAHVRKVTALQRLGTQKELGELVTFLASGSCDYLTGQVFCLAGGFPVVERWPSVPE

SEQ ID NO: 819 - DNA, 768 bp, Artificial Sequence
  HHDH variant
  CDS (1)..(768)
atgagcaccgctattgtcaccaacgtcaagcattttggaggtatgggtagcgctctgcgtctgagcgaagctggtcataccgtcgcttgccatgatgaaagctttaagcatcaggatgaactagaagcttttgctgaaacctacccacagctgataccaatcagcgaacaggaaccagctgaactgattgaagctgtcaatagcgcccttggtcatgtcgatatcctggtcagcaacgatatcgcgcctgtggaatggcggccaatcgataaatacgctgtcgaggattacagggatactgtcgaagctctgcagatcaagccatttgctctagcaaatgccgtcgcttcgcaaatgaaggagcgaaagtcggggcacatcatcttcatcacttcggctgccccgttcgggccatggaaggagctatcgacttacgcatcggctcgagctgggaccagtgcactagctaatgctctatcgaaggagctaggagagtacaatatcccggtgttcgctatcgctccgaacgccctagactcgggggattcgccgtactattacccctctgagccgtggaagacttctccggagcacgtggctcacgtgcgtaagtacactgctctacaacgactagggactcaaaaagagttgggggaattggtgacgtttttggcttctggctcttgtgattatttgactggccaggtgtttaccttggcaggcggctttcccgttgtagagcgttggcccggcatgcccgaataatga

SEQ ID NO: 820 - protein, 254 aa, Artificial Sequence
  HHDH variant
MSTAIVTNVKHFGGMGSALRLSEAGHTVACHDESFKHQDELEAFAETYPQLIPISEQEPAELIEAVNSALGHVDILVSNDIAPVEWRPIDKYAVEDYRDTVEALQIKPFALANAVASQMKERKSGHIIFITSAAPFGPWKELSTYASARAGTSALANALSKELGEYNIPVFAIAPNALDSGDSPYYYPSEPWKTSPEHVAHVRKYTALQRLGTQKELGELVTFLASGSCDYLTGQVFTLAGGFPVVERWPGMPE

SEQ ID NO: 821 - DNA, 768 bp, Artificial Sequence
  HHDH variant
  CDS (1)..(768)
atgagcaccgctattgtcaccaacgtcaagcattttggaggtatgggtagcgctctgcgtctgagcgaagctggtcataccgtcgcttgccatgatgaaagctttaagcatctggatgaactagaagcttttgctgaaacctacccacagctgataccaatgagcgaacaggaaccagctgaactgattgaagctgtcaatagcgcccttggtcatgtcgatatcctggtcagcaacgatatcgcgcctgtggaatggcggccaatcgataaatacgctgtcgaggattacaggggcacggtcgaagctctgcagatcaagccatttgctctagcaaatgccgtcgcttcgcaaatgaaggagcgaaagtcggggcacatcatcttcatcacttcggctgccccgttcgggccatggaaggagctatcgacttactcttcggctcgagctgggaccagtgcactagctaatgctctatcgaaggagctaggagagtacaatatcccggtgttcgctatcgctccgaacgccctagactcgggggattcgccgtactattacccctctgagccgtggaagacttctccggagcacgtggctcacgtgcgtaagtacactgctctacaacgactagggactcaaaaagagttgggggaattggtgacgtttttggcatctggctcttgtgattatttgactggccaggtgtttaccttggcaggcggctttcccgttgtagagcgttggccctccgtgcccgaataatga

SEQ ID NO: 822 - protein, 254 aa, Artificial Sequence
  HHDH variant
MSTAIVTNVKHFGGMGSALRLSEAGHTVACHDESFKHLDELEAFAETYPQLIPMSEQEPAELIEAVNSALGHVDILVSNDIAPVEWRPIDKYAVEDYRGTVEALQIKPFALANAVASQMKERKSGHIIFITSAAPFGPWKELSTYSSARAGTSALANALSKELGEYNIPVFAIAPNALDSGDSPYYYPSEPWKTSPEHVAHVRKYTALQRLGTQKELGELVTFLASGSCDYLTGQVFTLAGGFPVVERWPSVPE

SEQ ID NO: 823 - DNA, 768 bp, Artificial Sequence
  HHDH variant
  CDS (1)..(768)
atgagcaccgctattgtcaccaacgtcaagcattttggaggtatgggtagcgctctgcgtctgagcgaagctggtcataccgtcgcttgccatgatgaaagctttaagcatcaggatgaactagaagcttttgctgaaacctacccacagctgataccaatgagcgaacaggaaccagctgaactgattgaagctgtcactagcgcccttggtcatgtcgatatcctggtcagcaacgatatcgcgcctgtggaatggcggccaatcgataaatacgctgtcgaggattacagggatactgtcgaagctctgcagatcaagccattcgctctagtgaatgctgtcgctccgcaaatgaagcgtcgaaagtcggggcacatcatcttcatcacttcggctgcctcattcgggccatggaaggagctatcgacttacgcatcggctcgagctgggaccagtgcactagctaatgctctatcgaaggagctaggagagtacaatatcccggtgttcgctatcgctccgaacgccctagactcgggggattcgccgtactattacccctctgagccgtggaagacttctccggagcacgtggctcacgtgcgtaagtacactgctctacaacgactagggactcaaaaagagttgggggaattggtgacgtttttggcatctggctcttgtgattatttgactggccaggtgttttggttggcaggcggctttcccgttgtagagcgttggccctccgtgcccgaataatga

SEQ ID NO: 824 - protein, 254 aa, Artificial Sequence
  HHDH variant
MSTAIVTNVKHFGGMGSALRLSEAGHTVACHDESFKHQDELEAFAETYPQLIPMSEQEPAELIEAVTSALGHVDILVSNDIAPVEWRPIDKYAVEDYRDTVEALQIKPFALVNAVAPQMKRRKSGHIIFITSAASFGPWKELSTYASARAGTSALANALSKELGEYNIPVFAIAPNALDSGDSPYYYPSEPWKTSPEHVAHVRKYTALQRLGTQKELGELVTFLASGSCDYLTGQVFWLAGGFPVVERWPSVPE

SEQ ID NO: 825 - DNA, 768 bp, Artificial Sequence
  HHDH variant
  CDS (1)..(768)
atgagcaccgctattgtcaccaacgtcaagcattttggaggtatgggtagcgctctgcgtctgagcgaagctggtcataccgtcgcttgccatgatgaaagctttaagcatcaggatgaactagaagcttttgctgaaacctacccacagctgataccaatgagcgaacaggaaccagctgaactgattgaagctgtcactagcgcccttggtcatgtcgatatcctggtcagcaacgatatcgcgcctgtggaatggcggccaatcgataaatacgctgtcgaggattacagggacacggtcgaagctctgcagatcaagccatttgctctagcaaatgccgtcgcttcgcaaatgaagcgtcgaaagtcggggcacatcatcttcatcacttcggctgccccgttcgggccatggaaggagctatcgacttactcttcggctcgagctgggaccagtgcactagctaatgctctatcgaaggagctaggagagtacaatatcccggtgttcgctatcgctccgaacgccctagactcgggggattcgccgtactattacccctctgagccgtggaagacttctccggagcacgtggctcacgtgcgtaagtacactgctctacaacgactagggactcaaaaagagttgggggaattggtgacgtttttggcatctggctcttgtgattatttgactggccaggtgtttaccttggcaggcggctttcccgttgtagagcgttggcccggggtgcccgaataatga

SEQ ID NO: 826 - protein, 254 aa, Artificial Sequence
  HHDH variant
MSTAIVTNVKHFGGMGSALRLSEAGHTVACHDESFKHQDELEAFAETYPQLIPMSEQEPAELIEAVTSALGHVDILVSNDIAPVEWRPIDKYAVEDYRDTVEALQIKPFALANAVASQMKRRKSGHIIFITSAAPFGPWKELSTYSSARAGTSALANALSKELGEYNIPVFAIAPNALDSGDSPYYYPSEPWKTSPEHVAHVRKYTALQRLGTQKELGELVTFLASGSCDYLTGQVFTLAGGFPVVERWPGVPE

SEQ ID NO: 827 - DNA, 768 bp, Artificial Sequence
  HHDH variant
  CDS (1)..(768)
atgagcaccgctattgtcaccaacgtcaagcattttggaggtatgggtagcgctctgcgtctgagcgaagctggtcataccgtcgcttgccatgatgaaagctttaagcatctggatgaactagaagcttttgctgaaacctacccacagctgataccaatcagcgaacaggaaccagctgaactgattgaagctgtcactagcgcccttggtcatgtcgatatcctggtcagcaacgatatcgcgcctgtggaatggcggccaatcgataaatacgctgtcgaggattacagggatactgtcgaagctctgcagatcaagccatttgctctagcaaatgccgtcgcttcgcaaatgaaggagcgaaagtcggggcacatcatcttcatcacttcggctgcctcattcgggccatggaaggagctatcgacttactcttcggctcgagctggggcgagtgcactagctaatgctctatcgaaggagctaggagagtacaatatcccggtgttcgctatcgctccgaacgccctagactcgggggattcgccgtactattacccctctgagccgtggaagacttctccggagcacgtggctcacgtgcgtaggtacactgctctacaacgactagggactcaaaaagagttgggggaattggtgacgtttttggcatctggctcttgtgattatttgactggccaggtgtttaccttggcaggcggctttcccgttgtagagcgttggcccggcatgcccgaataatga

SEQ ID NO: 828 - protein, 254 aa, Artificial Sequence
  HHDH variant
MSTAIVTNVKHFGGMGSALRLSEAGHTVACHDESFKHLDELEAFAETYPQLIPISEQEPAELIEAVTSALGHVDILVSNDIAPVEWRPIDKYAVEDYRDTVEALQIKPFALANAVASQMKERKSGHIIFITSAASFGPWKELSTYSSARAGASALANALSKELGEYNIPVFAIAPNALDSGDSPYYYPSEPWKTSPEHVAHVRRYTALQRLGTQKELGELVTFLASGSCDYLTGQVFTLAGGFPVVERWPGMPE

SEQ ID NO: 829 - DNA, 768 bp, Artificial Sequence
  HHDH variant
  CDS (1)..(768)
atgagcaccgctattgtcaccaacgtcaagcattttggaggtatgggtagcgctctgcgtctgagcgaagctggtcataccgtcgcttgccatgatgaaagctttaagcatcaggatgaactagaagcttttgctgaaacctacccacagctgataccaatcagcgaacaggaaccagctgaactgattgaagctgtcaatagcgcccttggtcatgtcgatatcctggtcagcaacgatatcgcgcctgtggaatggcggccaatcgataaatacgctgtcgaggattacagggacacggtcgaagctctgcagatcaagccatttgctctagcaaatgccgtcgcttcgcaaatgaagcgtcgaaagtcggggcacatcatcttcatcacttcggctgccccgttcgggccatggaaggagctatcgacttactcttcggctcgagctgggaccagtgcactagctaatgctctatcgaaggagctaggagagtacaatatcccggtgttcgctatcgctccgaacgccctagactcgggggattcgccgtactattacccctctgagccgtggaagacttctccggagcacgtggctcacgtgcgtaaggtgactgctctacaacgactagggactcaaaaagagttgggggaattggtgacgtttttggcatctggctcttgtgattatttgactggccaggtgtttaccttggcaggcggctttcccgttgtagagcgttggccctccgtgcccgaataatga

SEQ ID NO: 830 - protein, 254 aa, Artificial Sequence
  HHDH variant
MSTAIVTNVKHFGGMGSALRLSEAGHTVACHDESFKHQDELEAFAETYPQLIPISEQEPAELIEAVNSALGHVDILVSNDIAPVEWRPIDKYAVEDYRDTVEALQIKPFALANAVASQMKRRKSGHIIFITSAAPFGPWKELSTYSSARAGTSALANALSKELGEYNIPVFAIAPNALDSGDSPYYYPSEPWKTSPEHVAHVRKVTALQRLGTQKELGELVTFLASGSCDYLTGQVFTLAGGFPVVERWPSVPE

SEQ ID NO: 831 - DNA, 768 bp, Artificial Sequence
  HHDH variant
  CDS (1)..(768)
atgagcaccgctattgtcaccaacgtcaagcattttggaggtatgggtagcgctctgcgtctgagcgaagctggtcataccgtcgcttgccatgatgaaagctttaagcatctggatgaactagaagcttttgctgaaacctacccacagctgataccaatcagcgaacaggaaccagctgaactgattgaagctgtcactagcgcccttggtcatgtcgatatcctggtcagcaacgatatcgcgcctgtggaatggcggccaatcgataaatacgctgtcgaggattacagggatactgtcgaagctctgcagatcaagccatttgctctagcaaatgccgtcgcttcgcaaatgaaggatcgaaagtcggggcacatcatcttcatcacttcggctgccccgttcgggccatggaaggagctatcgacttactcttcggctcgagctggggcgagtgcactagctaatgctctatcgaaggagctaggagagtacaatatcccggtgttcgctatcgctccgaacgccctagactcgggggattcgccgtactattacccctctgagccgtggaagacttctccggagcacgtggctcacgtgcgtaagtacactgctctacaacgactagggactcaaaaagagttgggggaattggtgacgtttttggcatctggctcttgtgattatttgactggccaggtgtttaccttggcaggcggctttcccgttgtagagcgttggcccggcatgcccgaataatga

SEQ ID NO: 832 - protein, 254 aa, Artificial Sequence
  HHDH variant
MSTAIVTNVKHFGGMGSALRLSEAGHTVACHDESFKHLDELEAFAETYPQLIPISEQEPAELIEAVTSALGHVDILVSNDIAPVEWRPIDKYAVEDYRDTVEALQIKPFALANAVASQMKDRKSGHIIFITSAAPFGPWKELSTYSSARAGASALANALSKELGEYNIPVFAIAPNALDSGDSPYYYPSEPWKTSPEHVAHVRKYTALQRLGTQKELGELVTFLASGSCDYLTGQVFTLAGGFPVVERWPGMPE

SEQ ID NO: 833 - DNA, 768 bp, Artificial Sequence
  HHDH variant
  CDS (1)..(768)
atgagcaccgctattgtcaccaacgtcaagcattttggaggtatgggtagcgctctgcgtctgagcgaagctggtcataccgtcgcttgccatgatgaaagctttaagcatctggatgaactagaagcttttgctgaaacctacccacagctgataccaatcagcgaacaggaaccagctgaactgattgaagctgtcactagcgcccttggtcatgtcgatatcctggtcagcaacgatatcgcgcctgtggaatggcggccaatcgataaatacgctgtcgaggattacagggacatggtcgaagctctgcagatcaagccatttgctctagcaaatgccgtcgcttcgcaaatgaaggagcgaaagtcggggcacatcatcttcatcacttcggctgccccgttcgggccatggaaggagctatcgacttactcttcggctcgagctgggaccagtgcactagctaatgctctatcgaaggagctaggagagtacaatatcccggtgttcgctatcgctccgaacgccctagactcgggggattcgccgtactattacccctctgagccgtggaagacttctccggagcacgtggctcacgtgcgtaagtacactgctctacaacgactagggactcaaaaagagttgggggaattggtgacgtttttggcatctggctcttgtgattatttgactggccaggtgtttaccttggcaggcggctttcccgttgtagagcgttggcccggcatgcccgaataatga

SEQ ID NO: 834 - protein, 254 aa, Artificial Sequence
  HHDH variant
MSTAIVTNVKHFGGMGSALRLSEAGHTVACHDESFKHLDELEAFAETYPQLIPISEQEPAELIEAVTSALGHVDILVSNDIAPVEWRPIDKYAVEDYRDMVEALQIKPFALANAVASQMKERKSGHIIFITSAAPFGPWKELSTYSSARAGTSALANALSKELGEYNIPVFAIAPNALDSGDSPYYYPSEPWKTSPEHVAHVRKYTALQRLGTQKELGELVTFLASGSCDYLTGQVFTLAGGFPVVERWPGMPE

SEQ ID NO: 835 - DNA, 768 bp, Artificial Sequence
  HHDH variant
  CDS (1)..(768)
atgagcaccgctattgtcaccaacgtcaagcattttggaggtatgggtagcgctctgcgtctgagcgaagctggtcataccgtcgcttgccatgatgaaagctttaagcatcaggatgaactagaagcttttgctgaaacctacccacagctgataccaatcagcgaacaggaaccagctgaactgattgaagctgtcactagcgcccttggtcatgtcgatatcctggtcagcaacgatatcgcgcctgtggaatggcggccaatcgataaatacgctgtcgaggattacaggggcacggtcgaagctctgcagatcaagccatttgctctagcaaatgccgtcgcttcgcaaatgaaggagcgaaagtcggggcacatcatcttcatcacttcggctgccccgttcgggccatggaaggagctatcgacttacgcatcggctcgagctgggaccagtgcactagctaatgctctatcgaaggagctaggagagtacaatatcccggtgttcgctatcgctccgaacgccctagacacgggggattcgccgtactattacccctctgagccgtggaagacttctccggagcacgtggctcacgtgcgtaagtacactgctctacaacgactagggactcaaaaagagttgggggaattggtgacgtttttggcatctggctcttgtgattatttgactggccaggtgtttaccttggcaggcggctttcccgttgtagagcgttggcccggggtgcccgaataatga

SEQ ID NO: 836 - protein, 254 aa, Artificial Sequence
  HHDH variant
MSTAIVTNVKHFGGMGSALRLSEAGHTVACHDESFKHQDELEAFAETYPQLIPISEQEPAELIEAVTSALGHVDILVSNDIAPVEWRPIDKYAVEDYRGTVEALQIKPFALANAVASQMKERKSGHIIFITSAAPFGPWKELSTYASARAGTSALANALSKELGEYNIPVFAIAPNALDTGDSPYYYPSEPWKTSPEHVAHVRKYTALQRLGTQKELGELVTFLASGSCDYLTGQVFTLAGGFPVVERWPGVPE

SEQ ID NO: 837 - DNA, 768 bp, Artificial Sequence
  HHDH variant
  CDS (1)..(768)
atgagcaccgctattgtcaccaacgtcaagcattttggaggtatgggtagcgctctgcgtctgagcgaagctggtcataccgtcgcttgccatgatgaaagctttaagcatctggatgaactagaagcttttgctgaaacctacccacagctgataccaatgagcgaacaggaaccagctgaactgattgaagctgtcaatagcgcccttggtcatgtcgatatcctggtcagcaacgatatcgcgcctgtggaatggcggccaatcgataaatacgctgtcgaggattacaggggcatggtcgaagctctgcagatcaagccatttgctctagcaaatgccgtcgcttcgcaaatgaaggagcgaaagtcggggcacatcatcttcatcacttcggctgccccgttcgggccatggaaggagctatcgacttactcttcggctcgagctgggaccagtgcactagctaatgctctatcgaaggagctaggagagtacaatatcccggtgttcgctatcgctccgaacgccctagactcgggggattcgccgtactattacccctctgagccgtggaagacttctccggagcacgtggctcacgtgcgtaaggtgactgctctacaacgactagggactcaaaaagagttgggggaattggtgacgtttttggcatctggctcttgtgattatttgactggccaggtgttttggttggcaggcggctttcccgttgtagagcgttggcccggcatgcccgaataatga

SEQ ID NO: 838 - protein, 254 aa, Artificial Sequence
  HHDH variant
MSTAIVTNVKHFGGMGSALRLSEAGHTVACHDESFKHLDELEAFAETYPQLIPMSEQEPAELIEAVNSALGHVDILVSNDIAPVEWRPIDKYAVEDYRGMVEALQIKPFALANAVASQMKERKSGHIIFITSAAPFGPWKELSTYSSARAGTSALANALSKELGEYNIPVFAIAPNALDSGDSPYYYPSEPWKTSPEHVAHVRKVTALQRLGTQKELGELVTFLASGSCDYLTGQVFWLAGGFPVVERWPGMPE

SEQ ID NO: 839 - DNA, 768 bp, Artificial Sequence
  HHDH variant
  CDS (1)..(768)
atgagcaccgctattgtcaccaacgtcaagcattttggaggtatgggtagcgctctgcgtctgagcgaagctggtcataccgtcgcttgccatgatgaaagctttaagcatctggatgaactagaagcttttgctgaaacctacccacagctgataccaatgagcgaacaggaaccagctgaactgattgaagctgtcaatagcgcccttggtcatgtcgatatcctggtcagcaacgatatcgcgcctgtggaatggcggccaatcgataaatacgctgtcgaggattacagggatactgtcgaagctctgcagatcaagccatttgctctagcaaatgccgtcgcttcgcaaatgaagcgtcgaaagtcggggcacatcatcttcatcacttcggctgcctcattcgggccatggaaggagctatcgacttactcttcggctcgagctgggaccagtgcactagctaatgctctatcgaaggagctaggagagtacaatatcccggtgttcgctatcgctccgaacgccctagactcgggggattcgccgtactattacccctctgagccgtggaagacttctccggagcacgtggctcacgtgcgtaagtacactgctctacaacgactagggactcaaaaagagttgggggaattggtgacgtttttggcatctggctcttgtgattatttgactggccaggtgttttggttggcaggcggctttcccgttgtagagcgttggccctccatgcccgaataatga

SEQ ID NO: 840 - protein, 254 aa, Artificial Sequence
  HHDH variant
MSTAIVTNVKHFGGMGSALRLSEAGHTVACHDESFKHLDELEAFAETYPQLIPMSEQEPAELIEAVNSALGHVDILVSNDIAPVEWRPIDKYAVEDYRDTVEALQIKPFALANAVASQMKRRKSGHIIFITSAASFGPWKELSTYSSARAGTSALANALSKELGEYNIPVFAIAPNALDSGDSPYYYPSEPWKTSPEHVAHVRKYTALQRLGTQKELGELVTFLASGSCDYLTGQVFWLAGGFPVVERWPSMPE

SEQ ID NO: 841 - DNA, 768 bp, Artificial Sequence
  HHDH variant
  CDS (1)..(768)
atgagcaccgctattgtcaccaacgtcaagcattttggaggtatgggtagcgctctgcgtctgagcgaagctggtcataccgtcgcttgccatgatgaaagctttaagcatctggatgaactagaagcttttgctgaaacctacccacagctgataccaatcagcgaacaggaaccagctgaactgattgaagctgtcaatagcgcccttggtcatgtcgatatcctggtcagcaacgatatcgcgcctgtggaatggcggccaatcgataaatacgctgtcgaggattacaggggcatggtcgaagctctgcagatcaagccatttgctctagcaaatgccgtcgcttcgcaaatgaagcgtcgaaagtcggggcacatcatcttcatcacttcggctgccccgttcgggccatggaaggagctatcgacttacgcatcggctcgagctgggaccagtgcactagctaatgctctatcgaaggagctaggagagtacaatatcccggtgttcgctatcgctccgaacgccctagactcgggggattcgccgtactattacccctctgagccgtggaagacttctccggagcacgtggctcacgtgcgtaaggtgactgctctacaacgactagggactcaaaaagagttgggggaattggtgacgtttttggcatctggctcttgtgattatttgactggccaggtgttttggttggcaggcggctttcccgttgtagagcgttggccctccgtgcccgaataatga

SEQ ID NO: 842 - protein, 254 aa, Artificial Sequence
  HHDH variant
MSTAIVTNVKHFGGMGSALRLSEAGHTVACHDESFKHLDELEAFAETYPQLIPISEQEPAELIEAVNSALGHVDILVSNDIAPVEWRPIDKYAVEDYRGMVEALQIKPFALANAVASQMKRRKSGHIIFITSAAPFGPWKELSTYASARAGTSALANALSKELGEYNIPVFAIAPNALDSGDSPYYYPSEPWKTSPEHVAHVRKVTALQRLGTQKELGELVTFLASGSCDYLTGQVFWLAGGFPVVERWPSVPE

SEQ ID NO: 843 - DNA, 768 bp, Artificial Sequence
  HHDH variant
  CDS (1)..(768)
atgagcaccgctattgtcaccaacgtcaagcattttggaggtatgggtagcgctctgcgtctgagcgaagctggtcataccgtcgcttgccatgatgaaagctttaagcatctggatgaactagaagcttttgctgaaacctacccacagctgataccaatgagcgaacaggaaccagctgaactgattgaagctgtcactagcgcccttggtcatgtcgatatcctggtcagcaacgatatcgcgcctgtggaatggcggccaatcgataaatacgctgtcgaggattacaggggtatggtcgaagctctgcagatcaagccatttgctctagcaaatgccgtcgcttcgcaaatgaagcgtcgaaagtcggggcacatcatcttcatcacttcggctgccccgttcgggccatggaaggagctatcgacttactcttcggctcgagctgggaccagtgcactagctaatgctctatcgaaggagctaggagagtacaatatcccggtgttcgctatcgctccgaacgccctagactcgggggattcgccgtactattacccctctgagccgtggaagacttctccggagcacgtggctcacgtgcgtaaggtgactgctctacaacgactagggactcaaaaagagttgggggaattggtgacgtttttggcatctggctcttgtgattatttgactggccaggtgttttgtttggcaggcggctttcccgttgtagagcgttggcccggcatgcccgaataatga

SEQ ID NO: 844 - protein, 254 aa, Artificial Sequence
  HHDH variant
MSTAIVTNVKHFGGMGSALRLSEAGHTVACHDESFKHLDELEAFAETYPQLIPMSEQEPAELIEAVTSALGHVDILVSNDIAPVEWRPIDKYAVEDYRGMVEALQIKPFALANAVASQMKRRKSGHIIFITSAAPFGPWKELSTYSSARAGTSALANALSKELGEYNIPVFAIAPNALDSGDSPYYYPSEPWKTSPEHVAHVRKVTALQRLGTQKELGELVTFLASGSCDYLTGQVFCLAGGFPVVERWPGMPE

SEQ ID NO: 845 - DNA, 768 bp, Artificial Sequence
  HHDH variant
  CDS (1)..(768)
atgagcaccgctattgtcaccaacgtcaagcattttggaggtatgggtagcgctctgcgtctgagcgaagctggtcataccgtcgcttgccatgatgaaagctttaagcatctggatgaactagaagcttttgctgaaacctacccacagctgataccaatcagcgaacaggaaccagctgaactgattgaagctgtcactagcgcccttggtcatgtcgatatcctggtcagcaacgatatcgcgcctgtggaatggcggccaatcgataaatacgctgtcgaggattacagggatactgtcgaagctctgcagatcaagccatttgctctagcaaatgccgtcgcttcgcaaatgaagcgtcgaaagtcggggcacatcatcttcatcacttcggctgccccgttcgggccatggaaggagctatcgacttacgcatcggctcgagctgggaccagtgcactagctaatgctctatcgaaggagctaggagagtacaatatcccggtgttcgctatcgctccgaacgccctagactcgggggattcgccgtactattacccctctgagccgtggaagacttctccggagcacgtggctcacgtgcgtaaggtgactgctctacaacgactagggactcaaaaagagttgggggaattggtgacgtttttggcatctggctcttgtgattatttgacgggccaggtgttttggttggcaggcggctttcccgttgtagagcgttggccctccgtgcccgaataatga

SEQ ID NO: 846 - protein, 254 aa, Artificial Sequence
  HHDH variant
MSTAIVTNVKHFGGMGSALRLSEAGHTVACHDESFKHLDELEAFAETYPQLIPISEQEPAELIEAVTSALGHVDILVSNDIAPVEWRPIDKYAVEDYRDTVEALQIKPFALANAVASQMKRRKSGHIIFITSAAPFGPWKELSTYASARAGTSALANALSKELGEYNIPVFAIAPNALDSGDSPYYYPSEPWKTSPEHVAHVRKVTALQRLGTQKELGELVTFLASGSCDYLTGQVFWLAGGFPVVERWPSVPE

SEQ ID NO: 847 - DNA, 768 bp, Artificial Sequence
  HHDH variant
  CDS (1)..(768)
atgagcaccgctattgtcaccaacgtcaagcattttggaggtatgggtagcgctctgtgtatgagcgaagctggtcataccgtcgcttgccatgatgaaagctttaagcatcaggatgaactagaagcttttgctgaaacctacccacagctgataccaatgagcgaacaggaaccagctgaactgattgaagctgtcactagcgcccttggtcatgtcgatatcctggtcagcaacgatatcgcgcctgtggaatggcggccaatcgataaatacgctgtcgaggattacaggggcacggtcgaagctctgcagatcaagccatttgctctagcaaatgccgtcgcttcgcaaatgaaggagcgaaagtcggggcacatcatcttcatcacttcggctgccccgttcgggccatggaaggagctatcgacttacgcatcggctcgagctgggaccagtgcactagctaatgctctatcgaaggagctaggagagtacaatatcccggtgttcgctatcgctccgaacgccctagactcgggggattcgccgtactattacccctctgagccgtggaagacttctccggagcacgtggctcacgtgcgtaagtacactgctctacaacgactagggactcaaaaagagttgggggaattggtgacgtttttggcatctggctcttgtgattatttgactggccaggtgttttggttggcaggcggctttcccgttgtagagcgttggcccgaggtgcccgaatgatga

SEQ ID NO: 848 - protein, 254 aa, Artificial Sequence
  HHDH variant
MSTAIVTNVKHFGGMGSALCMSEAGHTVACHDESFKHQDELEAFAETYPQLIPMSEQEPAELIEAVTSALGHVDILVSNDIAPVEWRPIDKYAVEDYRGTVEALQIKPFALANAVASQMKERKSGHIIFITSAAPFGPWKELSTYASARAGTSALANALSKELGEYNIPVFAIAPNALDSGDSPYYYPSEPWKTSPEHVAHVRKYTALQRLGTQKELGELVTFLASGSCDYLTGQVFWLAGGFPVVERWPEVPE

SEQ ID NO: 849 - DNA, 768 bp, Artificial Sequence
  HHDH variant
  CDS (1)..(768)
atgagcaccgctattgtcaccaacgtcaagcattttggaggtatgggtagcgctctgcgtctgagcgaagctggtcataccgtcgcttgccatgatgaaagctttaagcatctggatgaactagaagcttttgctgaaacctacccacagctgataccaatcagcgaacaggaaccagctgaactgattgaagctgtcactagcgcccttggtcatgtcgatatcctggtcagcaacgatatcgcgcctgtggaatggcggccaatcgataaatacgctgtcgaggattacagggacacggtcgaagctctgcagatcaagccatttgctctagcaaatgccgtcgcttcgcaaatgaaggaacgaaagtcggggcacatcatcttcatcacttcggctgcctcattcgggccatggaaggagctatcgacttacgcatcggctcgagctgggaccagtgcactagctaatgctctatcgaaggagctaggagagtacaatatcccggtgttcgctatcgctccgaacgccctagacacgggggattcgccgtactattacccctctgagccgtggaagacttctccggagcacgtggctcacgtgcgtaagtacactgctctacaacgactagggactcaaaaagagttgggggaattggtgacgtttttggcatctggctcttgtgattatttgactggccaggtgttttggttggcaggcggctttcccgttgtagagcgttggcccggcatgcccgaataatga

SEQ ID NO: 850 - protein, 254 aa, Artificial Sequence
  HHDH variant
MSTAIVTNVKHFGGMGSALRLSEAGHTVACHDESFKHLDELEAFAETYPQLIPISEQEPAELIEAVTSALGHVDILVSNDIAPVEWRPIDKYAVEDYRDTVEALQIKPFALANAVASQMKERKSGHIIFITSAASFGPWKELSTYASARAGTSALANALSKELGEYNIPVFAIAPNALDTGDSPYYYPSEPWKTSPEHVAHVRKYTALQRLGTQKELGELVTFLASGSCDYLTGQVFWLAGGFPVVERWPGMPE

SEQ ID NO: 851 - DNA, 768 bp, Artificial Sequence
  HHDH variant
  CDS (1)..(768)
atgagcaccgctattgtcaccaacgtcaagcattttggaggtatgggtagcgctctgcgtctgagcgaagctggtcataccgtcgcttgccatgatgaaagctttaagcatcaggatgaactagaagcttttgctgaaacctacccacagctgataccaatgagcgaacaggaaccagctgaactgattgaagctgtcaatagcgcccttggtcatgtcgatatcctggtcagcaacgatatcgcgcctgtggaatggcggccaatcgataaatacgctgtcgaggattacagggatactgtcgaagctctgcagatcaagccatttgctctagcaaatgccgtcgcttcgcaaatgaaggagcgaaagtcggggcacatcatcttcatcacttcggctgccccgttcgggccatggaaggagctatcgacttacgcatcggctcgagctgggaccagtgcactagctaatgctctatcgaaggagctaggagagtacaatatcccggtgttcgctatcgctccgaacgccctagacacgggggattcgccgtactattacccctctgagccgtggaagacttctccggagcacgtggctcacgtgcgtaagtacactgctctacaacgactagggactcaaaaagagttgggggaattggtgacgtttttggcatctggctcttgtgattatttgactggccaggtgttttgtttggcaggcggctttcccgttgtagagcgttggcccgaggtgcccgaataatga

SEQ ID NO: 852 - protein, 254 aa, Artificial Sequence
  HHDH variant
MSTAIVTNVKHFGGMGSALRLSEAGHTVACHDESFKHQDELEAFAETYPQLIPMSEQEPAELIEAVNSALGHVDILVSNDIAPVEWRPIDKYAVEDYRDTVEALQIKPFALANAVASQMKERKSGHIIFITSAAPFGPWKELSTYASARAGTSALANALSKELGEYNIPVFAIAPNALDTGDSPYYYPSEPWKTSPEHVAHVRKYTALQRLGTQKELGELVTFLASGSCDYLTGQVFCLAGGFPVVERWPEVPE

SEQ ID NO: 853 - DNA, 768 bp, Artificial Sequence
  HHDH variant
  CDS (1)..(768)
atgagcaccgctattgtcaccaacgtcaagcattttggaggtatgggtagcgctctgcgtctgagcgaagctggtcataccgtcgcttgccatgatgaaagctttaagcatcaggatgaactagaagcttttgctgaaacctacccacagctgataccaatcagcgaacaggaaccagctgaactgattgaagctgtcaatagcgcccttggtcatgtcaatatcctggtcagcaacgatatcgcgcctgtggaatggcggccaatcgataaatacgctgtcgaggattacaggggcatggtcgaagctctgcagatcaagccatttgctctagcaaatgccgtcgcttcgcaaatgaaggatcgaaagtcggggcacatcatcttcatcacttcggctgccccgttcgggccatggaaggagctatcgacttacgcatcggctcgagctggggcgagtgcactagctaatgctctatcgaaggagctaggagagtacaatatcccggtgttcgctatcgctccgaacgccctagactcgggggattcgccgtactattacccctctgagccgtggaagacttctccggagcacgtggctcacgtgcgtaaggtgactgctctacaacgactagggactcaaaaagagttgggggaattggtgacgtttttggcatctggctcttgtgattatttgactggccaggtgttttggttggcaggcggctttcccgttgtagagcgttggccctccgtgcccgaataatga

SEQ ID NO: 854 - protein, 254 aa, Artificial Sequence
  HHDH variant
MSTAIVTNVKHFGGMGSALRLSEAGHTVACHDESFKHQDELEAFAETYPQLIPISEQEPAELIEAVNSALGHVNILVSNDIAPVEWRPIDKYAVEDYRGMVEALQIKPFALANAVASQMKDRKSGHIIFITSAAPFGPWKELSTYASARAGASALANALSKELGEYNIPVFAIAPNALDSGDSPYYYPSEPWKTSPEHVAHVRKVTALQRLGTQKELGELVTFLASGSCDYLTGQVFWLAGGFPVVERWPSVPE

SEQ ID NO: 855 - DNA, 768 bp, Artificial Sequence
  HHDH variant
  CDS (1)..(768)
atgagcaccgctattgtcaccaacgtcaagcattttggaggtatgggtagcgctctgcctctgagcgaagctggtcataccgtcgcttgccatgatgaaagctttaagcatctggatgaactagaagcttttgctgaaacctacccacagctgataccaatgagcgaacaggaaccagctgaactgattgaagctgtcactagcgcccttggtcatgtcgatatcctggtcagcaacgatatcgcgcctgtggaatggcggccaatcgataaatacgctgtcgaggattacagggatactgtcgaagctctgcagatcaagccatttgctctagcaaatgccgtcgcttcgcaaatgaaggagcgaaagtcggggcacatcatcttcatcacttcggctgcctcattcgggccatggaaggagctatcgacttacgcatcggctcgagctgggaccagtgcactagctaatgctctatcgaaggagctaggagagtacaatatcccggtgttcgctatcgctccgaacgccctagacacgggggattcgccgtactattacccctctgagccgtggaagacttctccggagcacgtggctcacgtgcgtaaggtgactgctctacaacgactagggactcaaaaagagttgggggaattggtgacgtttttggcatctggctcttgtgattatttgactggccaggtgttttgtttggcaggcggctttcccgttgtagagcgttggccctccgtgcccgaataatga

SEQ ID NO: 856 - protein, 254 aa, Artificial Sequence
  HHDH variant
MSTAIVTNVKHFGGMGSALPLSEAGHTVACHDESFKHLDELEAFAETYPQLIPMSEQEPAELIEAVTSALGHVDILVSNDIAPVEWRPIDKYAVEDYRDTVEALQIKPFALANAVASQMKERKSGHIIFITSAASFGPWKELSTYASARAGTSALANALSKELGEYNIPVFAIAPNALDTGDSPYYYPSEPWKTSPEHVAHVRKVTALQRLGTQKELGELVTFLASGSCDYLTGQVFCLAGGFPVVERWPSVPE

SEQ ID NO: 857 - DNA, 768 bp, Artificial Sequence
  HHDH variant
  CDS (1)..(768)
atgagcaccgctattgtcaccaacgtcaagcattttggaggtatgggtagcgctctgcgtctgagcgaagctggtcataccgtcgcttgccatgatgaaagctttaagcatctggatgaactagaagcttttgctgaaacctacccacagctgataccaatgagcgaacaggaaccagctgaactgattgaagctgtcaatagcgcccttggtcatgtcgatatcctggtcagcaacgatatcgcgcctgtggaatggcggccaatcgataaatacgctgtcgaggattacagggatactgtcgaagctctgcagatcaagccatttgctctagcaaatgccgtcgcttcgcaaatgaaggagcgaaagtcggggcacatcatcttcatcacttcggctgccccgttcgggccatggaaggagctatcgacttactcttcggctcgagctgggaccagtgcactagctaatgctctatcgaaggagctaggagagtacaatatcccggtgttcgctatcgctccgaacgccctagacacgggggattcgccgtactattacccctctgagccgtggaagacttctccggagcacgtggctcacgtgcgtaagtacactgctctacaacgactagggactcaaaaagagttgggggaattggtgacgtttttggcatctggctcttgtgattatttgactggccaggtgttttgtttggcaggcggctttcccgttgtagagcgttggcccggcatgcccgaataatga

SEQ ID NO: 858 - protein, 254 aa, Artificial Sequence
  HHDH variant
MSTAIVTNVKHFGGMGSALRLSEAGHTVACHDESFKHLDELEAFAETYPQLIPMSEQEPAELIEAVNSALGHVDILVSNDIAPVEWRPIDKYAVEDYRDTVEALQIKPFALANAVASQMKERKSGHIIFITSAAPFGPWKELSTYSSARAGTSALANALSKELGEYNIPVFAIAPNALDTGDSPYYYPSEPWKTSPEHVAHVRKYTALQRLGTQKELGELVTFLASGSCDYLTGQVFCLAGGFPVVERWPGMPE

SEQ ID NO: 859 - DNA, 768 bp, Artificial Sequence
  HHDH variant
  CDS (1)..(768)
atgagcaccgctattgtcaccaacgtcaagcattttggaggtatgggtagcgctctgcgtctgagcgaagctggtcataccgtcgcttgccatgatgaaagctttaagcatctggatgaactagaagcttttgctgaaacctacccacagctgataccaatcagcgaacaggaaccagctgaactgattgaagctgtcaatagcgcccttggtcatgtcgatatcctggtcagcaacgatatcgcgcctgtggaatggcggccaatcgataaatacgctgtcgaggattacagggatactgtcgaagctctgcagatcaagccatttgctctagcaaatgccgtcgcttcgcaaatgaaggagcgaaagtcggggcacatcatcttcatcacttcggctgccccgttcgggccatggaaggagctatcgacttactcttcggctcgagctgggaccagtgcactagctaatgctctatcgaaggagctaggagagtacaatatcccggtgttcgctatcgctccgaacgccctagactcgggggattcgccgtactattacccctctgagccgtggaagacttctccggagcacgtggctcacgtgcgtaagtacactgctctacaacgactagggactcaaaaagagttgggggaattggtgacgtttttggcatctggctcttgtgattatttgactggccaggtgttttggttggcaggcggctttcccgttgtagagcgttggcccggcatgcccgaataatga

SEQ ID NO: 860 - protein, 254 aa, Artificial Sequence
  HHDH variant
MSTAIVTNVKHFGGMGSALRLSEAGHTVACHDESFKHLDELEAFAETYPQLIPISEQEPAELIEAVNSALGHVDILVSNDIAPVEWRPIDKYAVEDYRDTVEALQIKPFALANAVASQMKERKSGHIIFITSAAPFGPWKELSTYSSARAGTSALANALSKELGEYNIPVFAIAPNALDSGDSPYYYPSEPWKTSPEHVAHVRKYTALQRLGTQKELGELVTFLASGSCDYLTGQVFWLAGGFPVVERWPGMPE

SEQ ID NO: 861 - DNA, 768 bp, Artificial Sequence
  HHDH variant
  CDS (1)..(768)
atgagcaccgctattgtcaccaacgtcaagcattttggaggtatgggtagcgctctgcctctgagcgaagctggtcataccgtcgcttgccatgatgaaagctttaagcatctggatgaactagaagcttttgctgaaacctacccacagctgataccaatgagcgaacaggaaccagctgaactgattgaagctgtcactagcgcccttggtcatgtcgatatcctggtcagcaacgatatcgcgcctgtggaatggcggccaatcgataaatacgctgtcgaggattacaggggcacggtcgaagctctgcagatcaagccatttgctctagcaaatgccgtcgcttcgcaaatgaaggagcgaaagtcggggcacatcatcttcatcacttcggctgccccgttcgggccatggaaggagctatcgacttactcttcggctcgagctgggaccagtgcactagctaatgctctatcgaaggagctaggagagtacaatatcccggtgttcgctatcgctccgaacgccctagacacgggggattcgccgtactattacccctctgagccgtggaagacttctccggagcacgtggctcacgtgcgtaagtacactgctctacaacgactagggactcaaaaagagttgggggaattggtgacgtttttggcatctggctcttgtgattatttgactggccaggtgtttttgttggcaggcggctttcccgttgtagagcgttggcccggcatgcccgaataatga

SEQ ID NO: 862 - protein, 254 aa, Artificial Sequence
  HHDH variant
MSTAIVTNVKHFGGMGSALPLSEAGHTVACHDESFKHLDELEAFAETYPQLIPMSEQEPAELIEAVTSALGHVDILVSNDIAPVEWRPIDKYAVEDYRGTVEALQIKPFALANAVASQMKERKSGHIIFITSAAPFGPWKELSTYSSARAGTSALANALSKELGEYNIPVFAIAPNALDTGDSPYYYPSEPWKTSPEHVAHVRKYTALQRLGTQKELGELVTFLASGSCDYLTGQVFLLAGGFPVVERWPGMPE

SEQ ID NO: 863 - DNA, 768 bp, Artificial Sequence
  HHDH variant
  CDS (1)..(768)
atgagcaccgctattgtcaccaacgtcaagcattttggaggtatgggtagcgctctgcgtctgagcgaagctggtcataccgtcgcttgccatgatgaaagctttaagcatctggatgaactagaagcttttgctgaaacctacccacagctgataccaatgagcgaacaggaaccagctgaactgattgaagctgtcactagcgcccttggtcatgtcgatatcctggtcagcaacgatatcgcgcctgtggaatggcggccaatcgataaatacgctgtcgaggattacagggatactgtcgaagctctgcagatcaagccatttgctctagcaaatgccgtcgcttcgcaaatgaaggagcgaaagtcggggcacatcatcttcatcacttcggctgccccgttcgggccatggaaggagctatcgacttactcttcggctcgagctgggaccagtgcactagctaatgctctatcgaaggagctaggagagtacaatatcccggtgttcgctatcgctccgaacgccctagacacgggggattcgccgtactattacccctctgagccgtggaagacttctccggagcacgtggctcacgtgcgtaaggtgactgctctacaacgactagggactcaaaaagagttgggggaattggtgacgtttttggcatctggctcttgtgattatttgactggccaggtgtttaccttggcaggcggctttcccgttgtagagcgttggcccggcatgcccgaataatga

SEQ ID NO: 864 - protein, 254 aa, Artificial Sequence
  HHDH variant
MSTAIVTNVKHFGGMGSALRLSEAGHTVACHDESFKHLDELEAFAETYPQLIPMSEQEPAELIEAVTSALGHVDILVSNDIAPVEWRPIDKYAVEDYRDTVEALQIKPFALANAVASQMKERKSGHIIFITSAAPFGPWKELSTYSSARAGTSALANALSKELGEYNIPVFAIAPNALDTGDSPYYYPSEPWKTSPEHVAHVRKVTALQRLGTQKELGELVTFLASGSCDYLTGQVFTLAGGFPVVERWPGMPE

SEQ ID NO: 865 - DNA, 768 bp, Artificial Sequence
  HHDH variant
  CDS (1)..(768)
atgagcaccgctattgtcaccaacgtcaaacattttggaggtatgggtagcgctctgcgtctgagcgaagctggtcataccgtcgctgtgcatgatgaaagctttaagcatcaggatgaactagaagcttttgctgaaacctacccacagctgataccaatgagcgaacaggaaccagctgaactgattgaagctgtcaccagcgctcttggtcatgtcgatgtcctggtcagcaacgatatcgcgcctgtggaatggcggccaatcgataaatacgctgtcgaggattacagggatactgtcgaagctctgcagatcaagccatttgctctagtgaatgctgtcgcttcgcaaatgaagaagcgaaagtcggggcacatcatcttcatcacttcggctgccccgttcgggccatggaaggagctatcgacttactcttcggctcgagctggggctagtgcactagctaatgctctatcgaaggagctaggagagtacaatatcccggtgttcgctatcgctccgaattacctacactcgggggattcgccgtactattacccctctgagccgtggaagacttctccggagcacgtggctcacgtgcgtaaggtgactgctctacaacgactagggactcaaaaagagttgggggaattggtgacgtttttggcatctggctcttgtgattatttgactggccaggtgttttggttggcaggcggctttcccgtcatcgaacgttggcccggcatgcccgaataatga

SEQ ID NO: 866 - protein, 254 aa, Artificial Sequence
  HHDH variant
MSTAIVTNVKHFGGMGSALRLSEAGHTVAVHDESFKHQDELEAFAETYPQLIPMSEQEPAELIEAVTSALGHVDVLVSNDIAPVEWRPIDKYAVEDYRDTVEALQIKPFALVNAVASQMKKRKSGHIIFITSAAPFGPWKELSTYSSARAGASALANALSKELGEYNIPVFAIAPNYLHSGDSPYYYPSEPWKTSPEHVAHVRKVTALQRLGTQKELGELVTFLASGSCDYLTGQVFWLAGGFPVIERWPGMPE

SEQ ID NO: 867 - DNA, 768 bp, Artificial Sequence
  HHDH variant
  CDS (1)..(768)
atgagcaccgctattgtcaccaacgtcaaacattttggaggtatgggtagcgctctgcgtctgagcgaagctggtcataccgtcgcttgccatgatgaaagctttaagcatcaggatgaactagaagcttttgctgaaacctacccacagctgataccaatgagcgaacaggaaccagctgaactgattgaagctgtcaccagcgctcttggtcatgtcgatgtcctggtcagcaacgatatcgcgcctgtggaatggcggccaatcgataaatacgctgtcgaggattacagggatactgtcgaagaactgcagatcaagccatttgctctagtgaacgctgtcgcttcgcaaatgaagaagcgaaagtcggggcacatcatcttcatcacttcggctgccccgttcggaccatggaaggagctatcgacttactcttcggctcgagctggggctagtgcgctagctaatgctctatcgaaggagctaggagagtacaatatcccggtgttcgctatcgctccgaattacctacactcgggggattcgccgtactattacccctctgagccgtggaagacttctccggagcacgtggctcacgtgcgtaaggtgactgctctacaacgactagggactcaaaaagagttgggggaattggtgacgtttttggcatctggctcttgtgattatttgactggccaggtgttttggttggcaggcggctttcccgtcatcgaacgttggcccggcatgcccgaataatga

SEQ ID NO: 868 - protein, 254 aa, Artificial Sequence
  HHDH variant
MSTAIVTNVKHFGGMGSALRLSEAGHTVACHDESFKHQDELEAFAETYPQLIPMSEQEPAELIEAVTSALGHVDVLVSNDIAPVEWRPIDKYAVEDYRDTVEELQIKPFALVNAVASQMKKRKSGHIIFITSAAPFGPWKELSTYSSARAGASALANALSKELGEYNIPVFAIAPNYLHSGDSPYYYPSEPWKTSPEHVAHVRKVTALQRLGTQKELGELVTFLASGSCDYLTGQVFWLAGGFPVIERWPGMPE

SEQ ID NO: 869 - DNA, 768 bp, Artificial Sequence
  HHDH variant
  CDS (1)..(768)
atgagcaccgctattgtcaccaacgtcaaacattttggaggtatgggtagcgctctgcgtctgagcgaagctggtcataccgtcgcttgccatgatgaaagctttaagcatcaggatgaactagaagcttttgctcagacctacccacagctgataccaatgagcgaacaggaaccagctgaactgattgaagctgtcaccagcgctcttggtcatgtcgatgtcctggtcagcaacgatatcgcgcctgtggaatggcggccaatcgataaatacgctgtcgaggattacagggatactgtcgaagctctgcagatcaagccatttgctctagtgaatgctgtcgcttcgcaaatgaagaagcgaaagtcggggcacatcatcttcatcacttcggctgccccgttcgggccatggaaggagctatcgacttactcttcggctcgagctggggctagtgcactagctaatgctctatcgaaggagctaggagagtacaatatcccggtgttcgctatcgctccgaattacctacactcgggggattcgccgtactattacccctctgagccgtggaagacttctccggagcacgtggctcacgtgcgtaaggtgactgctctacaacgactagggactcaaaaagagttgggggaattggtgacgtttttggcatctggctcttgtgattatttgactggccaggtgttttggttggcaggcggctttcccgtcatcgaacgttggcccgccatgcccgaataatga

SEQ ID NO: 870 - protein, 254 aa, Artificial Sequence
  HHDH variant
MSTAIVTNVKHFGGMGSALRLSEAGHTVACHDESFKHQDELEAFAQTYPQLIPMSEQEPAELIEAVTSALGHVDVLVSNDIAPVEWRPIDKYAVEDYRDTVEALQIKPFALVNAVASQMKKRKSGHIIFITSAAPFGPWKELSTYSSARAGASALANALSKELGEYNIPVFAIAPNYLHSGDSPYYYPSEPWKTSPEHVAHVRKVTALQRLGTQKELGELVTFLASGSCDYLTGQVFWLAGGFPVIERWPAMPE

SEQ ID NO: 871 - DNA, 768 bp, Artificial Sequence
  HHDH variant
  CDS (1)..(768)
atgagcaccgctattgtcaccaacgtcaaacattttggaggtatgggtagcgctctgcgtctgagcgaagctggtcataccgtcgcttgccatgatgaaagctttgtgcatcaggatgaactagaagcttttgctgaaacctacccacagctgataccaatgagcgaacaggaaccagctgaactgattgaagctgtcaccagcgctcttggtcatgtcgatgtcctggtcagcaacgatatcgcgcctgtggaatggcggccaatcgataaatacgctgtcgaggattacagggatactgtcgaagctctgcagatcaagccatttgctctagtgaatgctgtcgcttcgcaaatgaagaagcgagagtcggggcacatcatcttcatcacttcggctgccccgttcgggccatggaaggagctatcgacttactcttcggctcgagctggggctagtgcactagctaatgctctatcgaaggagctaggagagtacaatatcccggtgttcgctatcgctccgaattacctacactcgggggattcgccgtactattacccctctgagccgtggaagacttctccggagcacgtggctcacgtgcgtaaggtgactgctctacaacgactagggactcaaaaagagttgggggaattggtgacgtttctggcatctggctcttgtgattatttgactggccaggtgttttggttggcaggcggctttcccgtcatcgaacgttggcccggcatgcccgaataatga

SEQ ID NO: 872 - protein, 254 aa, Artificial Sequence
  HHDH variant
MSTAIVTNVKHFGGMGSALRLSEAGHTVACHDESFVHQDELEAFAETYPQLIPMSEQEPAELIEAVTSALGHVDVLVSNDIAPVEWRPIDKYAVEDYRDTVEALQIKPFALVNAVASQMKKRESGHIIFITSAAPFGPWKELSTYSSARAGASALANALSKELGEYNIPVFAIAPNYLHSGDSPYYYPSEPWKTSPEHVAHVRKVTALQRLGTQKELGELVTFLASGSCDYLTGQVFWLAGGFPVIERWPGMPE

SEQ ID NO: 873 - DNA, 768 bp, Artificial Sequence
  HHDH variant
  CDS (1)..(768)
atgagcaccgctattgtcaccaacgtcaaacattttggaggtatgggtagcgctctgcgtctgagcgaagctggtcataccgtcgcttgccatgatgaaagctttaagcatcaggatgaactagaagcttttgctgaaacctacccacagctgataccaatgagcgaacaggaaccagctgaactgattgaagctgtcaccagcgctcttggtcatgtcgatgtcctggtcagcaacgatatcgcgcctgtggaatggcggccaatcgataaatacgctgtcgaggattacagggatactgtcgaagctctgcagatcaagccatttgctctagtgaatgctgtcgcttcgtcgatgaagaagcgaaagtcggggcacatcatcttcatcacttcggctgccccgttcgggccatggaaggagctatcgacttactcttcggctcgagctggggctagtgcactagctaatgctctatcgaaggagctaggagagtacaatatcccggtgttcgctatcgctccgaattacctacactcgggggattcgccgtactattacccctctgagccgtggaagacttctccggagcacgtggctcacgtgcgtaaggtgactgctctacaacgactagggactcaaaaagagttgggggaattggtgacgtttttggcatctggctcttgtgattatttgactggccaggtgttttggttggcaggcggctttcccgtcatcgaacgttggcccggcatgcccgaataatga

SEQ ID NO: 874 - protein, 254 aa, Artificial Sequence
  HHDH variant
MSTAIVTNVKHFGGMGSALRLSEAGHTVACHDESFKHQDELEAFAETYPQLIPMSEQEPAELIEAVTSALGHVDVLVSNDIAPVEWRPIDKYAVEDYRDTVEALQIKPFALVNAVASSMKKRKSGHIIFITSAAPFGPWKELSTYSSARAGASALANALSKELGEYNIPVFAIAPNYLHSGDSPYYYPSEPWKTSPEHVAHVRKVTALQRLGTQKELGELVTFLASGSCDYLTGQVFWLAGGFPVIERWPGMPE

SEQ ID NO: 875 - DNA, 768 bp, Artificial Sequence
  HHDH variant
  CDS (1)..(768)
atgagcaccgctattgtcaccaacgtcaaacattttggaggtatgggtagcgctctgcgtctgagcgaagctggtcataccgtcgcttgccatgatgaaagctttaagcatcaggatgaactagaagcttttgctgaaacctacccacagctgataccaatgagcgaacaggaaccagctgaactgattgaagctgtcaccagcgctcttggtcatgtcgatgtcctggtcagcaacgatattgcgcctgtggaatggagcccaatcgataaatacgctgtcgaggattacagggatactgtcgaagctctgcagatcaagccatttgctctagtgaatgctgtcgcttcgcaaatgaagaagcgaaagtcggggcacatcatcttcatcacttcggctgccccgttcgggccatggaaggagctatcgacttactcttcggctcgagctggggctagtgcactagctaatgctctatcgaaggagctaggagagtacaatatcccggtgttcgctatcgctccgaattacctacactcgggggattcgccgtactattacccctctgagccgtggaagacttctccggagcacgtggctcacgtgcgtaaggtgactgctctacaacgactagggactcaaaaagagttgggggaattggtgacgtttttggcgtctggctcttgtgattatttgactggccaggtgttttggttggcaggcggctttcccgtcatcgaacgttggcccggcatgcccgaataatga

SEQ ID NO: 876 - protein, 254 aa, Artificial Sequence
  HHDH variant
MSTAIVTNVKHFGGMGSALRLSEAGHTVACHDESFKHQDELEAFAETYPQLIPMSEQEPAELIEAVTSALGHVDVLVSNDIAPVEWSPIDKYAVEDYRDTVEALQIKPFALVNAVASQMKKRKSGHIIFITSAAPFGPWKELSTYSSARAGASALANALSKELGEYNIPVFAIAPNYLHSGDSPYYYPSEPWKTSPEHVAHVRKVTALQRLGTQKELGELVTFLASGSCDYLTGQVFWLAGGFPVIERWPGMPE

SEQ ID NO: 877 - DNA, 768 bp, Artificial Sequence
  HHDH variant
  CDS (1)..(768)
atgagcaccgctattgtcaccaacgtcaaacattttggaggtatgggtagcgctctgcgtctgagcgaagctggtcataccgtcgcttgccatgatgaaagctttaagcatcaggatgaactagaagcttttgctgaaacctacccacagctgataccaatgagcgaacaggaaccagctgaactgattgaagctgtcaccagcgctcttggtcatgtcgatgtcctggtcagcaacgatatcgcgcctgtggaatggcggccaatcgataaatacgctgtcgaggattacagggatactgtcgaagctctgcagatcaagccatttgctctagtgaatgctgtcgcttcgggtatgaagaagcgaaagtcggggcacatcatctttatcacttcggctgccccgttcgggccatggaaggagctatcgacttactcttcggctcgagctggggctagtgcactagctaatgctctatcgaaggagctaggagagtacaatatcccggtgttcgctatcgctccgaattacctacactcgggggattcgccgtactattacccctctgagccgtggaagacttctccggagcacgtggctcacgtgcgtaaggtgactgctctacaacgactagggactcaaaaagagttgggggaattggtgacgtttttggcatctggctcttgtgattatttgactggccaggtgttttggttggcaggcggctttcccgtcatcgaacgttggcccggcatgcccgaataatga

SEQ ID NO: 878 - protein, 254 aa, Artificial Sequence
  HHDH variant
MSTAIVTNVKHFGGMGSALRLSEAGHTVACHDESFKHQDELEAFAETYPQLIPMSEQEPAELIEAVTSALGHVDVLVSNDIAPVEWRPIDKYAVEDYRDTVEALQIKPFALVNAVASGMKKRKSGHIIFITSAAPFGPWKELSTYSSARAGASALANALSKELGEYNIPVFAIAPNYLHSGDSPYYYPSEPWKTSPEHVAHVRKVTALQRLGTQKELGELVTFLASGSCDYLTGQVFWLAGGFPVIERWPGMPE

SEQ ID NO: 879 - DNA, 768 bp, Artificial Sequence
  HHDH variant
  CDS (1)..(768)
atgagcaccgctattgtcaccaacgtcaaacattttggaggtatgggtagcgctctgcgtctgagcgaagctggtcataccgtcgcttgccatgatgaaagctttaagcatcaggatgaactagaagcttttgctgaaacctacccacagctgataccaatgagcgaacaggaaccagctgaactgattgaagctgtcaccagcgctcttggtcatgtcgacgtcctggtcagcaacgatatcgcgcctgtggaatggcggccaatcgataaatacgctgtcgaggattacagggatactgtcgaagctctgcagatcaagccatttgctctagtgaatgctgtcgcttcgcaaatgaagaagcgaaagtcggggcacatcatcttcatcacttcggctgccccgttcgggccatggaaggagctatcgacttactcttcggctcgagctggggctagtgcactagctaatgctctatcgaaggagctaggagagtacaatatcccggtgttcgctatcgctccgaattacctacactcgggggattcgccgtactattacccctctgagccgtggaagacttctccggagcacgtggctcacgtgcgtaagacgactgctctacaacgactagggactcaaaaagagttgggggaattggtgacgtttttggcatctggctcttgtgattatttgactggccaggtgttttggttggcaggcggctttcccgtcatcgaacgttggcccggcatgcccgaataatga

SEQ ID NO: 880 - protein, 254 aa, Artificial Sequence
  HHDH variant
MSTAIVTNVKHFGGMGSALRLSEAGHTVACHDESFKHQDELEAFAETYPQLIPMSEQEPAELIEAVTSALGHVDVLVSNDIAPVEWRPIDKYAVEDYRDTVEALQIKPFALVNAVASQMKKRKSGHIIFITSAAPFGPWKELSTYSSARAGASALANALSKELGEYNIPVFAIAPNYLHSGDSPYYYPSEPWKTSPEHVAHVRKTTALQRLGTQKELGELVTFLASGSCDYLTGQVFWLAGGFPVIERWPGMPE

SEQ ID NO: 881 - DNA, 768 bp, Artificial Sequence
  HHDH variant
  CDS (1)..(768)
atgagcaccgctattgtcaccaacgtcaaacattttggaggtatgggtagcgctctgcgtctgagcgaagctggtcataccgtcgcttgccatgatgaaagctttaagcatcaggatgaactagaagcttttgctgaaacctacccacagctgataccaatgagcgaacaggaaccagttgaactgattgaagctgtcaccagcgctcttggtcatgtcgatgtcctggtcagcaacgatatcgcgcctgtggaatggcggccaatcgataaatacgctgtcgaggattacagggatactgtcgaggctctgcagatcaagccatttgctctagtgaatgctgtcgcttcgcaaatgaagaagcgaaagtcggggcacatcatcttcatcacttcggctgccccgttcgggccatggaaggagctatcgacttactcttcggctcgagctggggctagtgcactagctaatgctctatcgaaggagctaggagagtacaatatcccggtgttcgctatcgctccgaattacctacactcgggggattcgccgtactattacccctctgagccgtggaagacttctccggagcacgtggctcacgtgcgtaaggtgactgctctacaacgactagggactcaaaaagagttgggggaattggtgacgtttttggcatctggctcttgtgattatttgactggccaggtgttttggttggcaggcggctttcccgtcatcgaacgttggcccggcatgcccgaataatga

SEQ ID NO: 882 - protein, 254 aa, Artificial Sequence
  HHDH variant
MSTAIVTNVKHFGGMGSALRLSEAGHTVACHDESFKHQDELEAFAETYPQLIPMSEQEPVELIEAVTSALGHVDVLVSNDIAPVEWRPIDKYAVEDYRDTVEALQIKPFALVNAVASQMKKRKSGHIIFITSAAPFGPWKELSTYSSARAGASALANALSKELGEYNIPVFAIAPNYLHSGDSPYYYPSEPWKTSPEHVAHVRKVTALQRLGTQKELGELVTFLASGSCDYLTGQVFWLAGGFPVIERWPGMPE

SEQ ID NO: 883 - DNA, 768 bp, Artificial Sequence
  HHDH variant
  CDS (1)..(768)
atgagcaccgctattgtcaccaacgtcaaacattttggaggtatgggtagcgctctgcgtctgagcgaagctggtcataccgtcgcttgccatgatgaaagctttaagcatcaggatgaactagaagcttttgctgaaacctacccacagctgataccaatgagcgaacaggaaccagctgaactgattgaagctgtcaccagcgctcttggtcatgtcgatgtcctggtcagcaacgatatcgcgcctgtggaatggcggccaatcgataaatacgctgtcgaggattacagggatactgtcgaagctctgcagatcaagccatttgctctagtgaatgctgtcgcttcgcaaatgaagaagcgaaagtcggggcacatcatcttcatcacttcggctgccccgttcgggccatggaaggagctatcgacttactcttcggctcgagctggggctagtgcactagctaatgctctatcgaaggagctaggagagtacaatatcccggtgttcgctatcgctccgaattacatgcactcgggggattcgccgtactattacccctctgagccgtggaagacttctccggagcacgtggctcacgtgcgtaaggtgactgctctacaacgactagggactcaaaaagagttgggggaattggtgacgtttttggcatctggctcttgtgattatttgactggccaggtgttttggttggcaggcggctttcccgtcatcgaacgttggcccggcatgcccgaataatga

SEQ ID NO: 884 - protein, 254 aa, Artificial Sequence
  HHDH variant
MSTAIVTNVKHFGGMGSALRLSEAGHTVACHDESFKHQDELEAFAETYPQLIPMSEQEPAELIEAVTSALGHVDVLVSNDIAPVEWRPIDKYAVEDYRDTVEALQIKPFALVNAVASQMKKRKSGHIIFITSAAPFGPWKELSTYSSARAGASALANALSKELGEYNIPVFAIAPNYMHSGDSPYYYPSEPWKTSPEHVAHVRKVTALQRLGTQKELGELVTFLASGSCDYLTGQVFWLAGGFPVIERWPGMPE

SEQ ID NO: 885 - DNA, 768 bp, Artificial Sequence
  HHDH variant
  misc_feature: S01705992
atgagcaccgctattgtcaccaacgtcaaacattttggaggtatgggtagcgctctgcgtctgagcgaagctggtcataccgtcgcttgccatgatgaaagctttaagcatcaggatgaactagaagcttttgctgaaacctacccacagctgataccaatgagcgaacaggaaccagctgaactgattgaagctgtcaccagcgctcttggtcatgtcgatgtcctggtcagcaacgatatcgcgcctgtggaatggcggccaatcgataaatacgctgtcgaggattacagggatactgtcgaagctctgcagatcaagccatttgctctagtgaatgctgtcgcttcgcaaatgaagaagcgaaagtcggggcacatcatcttcatcacttcggctgccccgttcgggccatggaaggagctatcgacttactcttcggctcgagctggggctagtgcactagctaatgctctatcgaaggagctaggagagtacaatatcccggtgttcgctatcgctccgaattacctacactcgggggattcgccgtactattacccctctgagccgtggaagacttctccgaatcacgtggctcacgtgcgtaaggtgactgctctacaacgactagggactcaaaaagagttgggggaattggtgacgtttttggcatctggctcttgtgattatttgactggccaggtgttttggttggcaggcggctttcccgtcatcgaacgttggcccggcatgcccgaataatga

SEQ ID NO: 886 - DNA, 768 bp, Artificial Sequence
  HHDH variant
  CDS (1)..(768)
atgagcaccgctattgtcaccaacgtcaaacattttggaggtatgggtagcgctctgcgtctgagcgaagctggtcataccgtcgcttgccatgatgaaagctttaagcatcaggatgaactagaagcttttgctgaaacctacccacagctgataccaatgagcgaacaggaaccagctgaactgattgaagctgtcaccagcgctcttggtcatgtcgatgtcctggtcagcaacgatatcgcgcctgtggaatggcggccaatcgataaatacgctgtcgaggattacagggatactgtcgaagctctgcagatcaagccatttgctctagtgaatgctgtcgcttcgcaaatgaagaagcgaaagtcggggcacatcatcttcatcacttcggctgccccgttcgggccatggaaggagctatcgacttactcttcggctcgagctggggctagtgcactagctaatgctctatcgaaggagctaggagagtacaatatcccggtgttcgctatcgctccgaattacctacactcgggggattcgccgtactattacccctctgagccgtggaagacttctccggagcacgtggctcacgtgcgtaaggtgactgctctacaacgactagggactcaaaaagagttgggggaattggtgacgtttttggcatctggctcttgtgattatttgactggccaggtgttttggttggcaggcggctttcccgttatcgaacgttggcccgagatgcccgaataatga

SEQ ID NO: 887 - protein, 254 aa, Artificial Sequence
  HHDH variant
MSTAIVTNVKHFGGMGSALRLSEAGHTVACHDESFKHQDELEAFAETYPQLIPMSEQEPAELIEAVTSALGHVDVLVSNDIAPVEWRPIDKYAVEDYRDTVEALQIKPFALVNAVASQMKKRKSGHIIFITSAAPFGPWKELSTYSSARAGASALANALSKELGEYNIPVFAIAPNYLHSGDSPYYYPSEPWKTSPEHVAHVRKVTALQRLGTQKELGELVTFLASGSCDYLTGQVFWLAGGFPVIERWPEMPE

SEQ ID NO: 888 - DNA, 768 bp, Artificial Sequence
  HHDH variant
  CDS (1)..(768)
atgagcaccgctattgtcaccaacgtcaaacattttggaggtatgggtagcgctctgcgtctgagcgaagctggtcataccgtcgcttgccatgatgaaagctttaagcatcaggatgaactagaagcttttgctgaaacctacccacagctgataccaatgagcgaacaggaaccagctgaactgattgaagctgtcaccagcgctcttggtcatgtcgatgtcctggtcagcaacgatatcgcgcctgtggaatggcggccaatcgataaatacgctgtcgaggattacagggatactgtcgaagctctgcagatcaagccatttgctctagtgaatgctgtcgcttcgcaaatgaagaagcgaaagtcggggcacatcatcttcatcacttcggctgccccgttcgggccatggaaggagctatcgacttactcttcggctcgagctggggctagtgcactagctaatgctctatcgaaggagctaggagggtacaatatcccggtgttcgctatcgctccgaattacctacactcgggggattcgccgtactattacccctctgagccgtggaagacttctccggagcacgtggctcacgtgcgtaaggtgactgctctacaacgactagggactcaaaaagagttgggggaattggtgacgtttttggcatctggctcttgtgattatttgactggccaggtgttttggttggcaggcggctttcccgtcatcgaacgttggcccggccttcccgaataatga

SEQ ID NO: 889 - protein, 254 aa, Artificial Sequence
  HHDH variant
MSTAIVTNVKHFGGMGSALRLSEAGHTVACHDESFKHQDELEAFAETYPQLIPMSEQEPAELIEAVTSALGHVDVLVSNDIAPVEWRPIDKYAVEDYRDTVEALQIKPFALVNAVASQMKKRKSGHIIFITSAAPFGPWKELSTYSSARAGASALANALSKELGGYNIPVFAIAPNYLHSGDSPYYYPSEPWKTSPEHVAHVRKVTALQRLGTQKELGELVTFLASGSCDYLTGQVFWLAGGFPVIERWPGLPE

SEQ ID NO: 890 - DNA, 768 bp, Artificial Sequence
  HHDH variant
  CDS (1)..(768)
atgagcaccgctattgtcaccaacgtcaaacattttggaggtatgggtagcgctctgcgtctgagcgaagctggtcataccgtcgcttgccatgatgaaagctttaagcatcaggatgaactagaagcttttgctgaaacctacccacagctgataccaatgagcgaacaggaaccagctgaactgattgaagctgtcaccagcgctcttggtcatgtcgatgtcctggtcagcaacgatatcgcgcctgtggaatggcggccaatcgataaatacgctgtcgaggattacagggatactctcgaagctctgcagatcaagccatttgctctagtgaatgctgtcgcttcgcaaatgaagaagcgaaagtcggggcacatcatcttcatcacttcggccgccccgttcgggccatggaaggagctatcgacttactcttcggctcgagctggggctagtgcactagctaatgctctatcgaaggagctaggagagtacaatatcccggtgttcgctatcgctccgaattacctacactcgggggattcgccgtactattacccctctgagccgtggaagacttctccggagcacgtggctcacgtgcgtaaggtgactgctctacaacgactagggactcaaaaagagttgggggaattggtgacgtttttggcatctggctcttgtgattatttgactggccaggtgttttggttggcaggcggctttcccgtcatcgaacgttggcccggcatgcccgaataatga

SEQ ID NO: 891 - protein, 254 aa, Artificial Sequence
  HHDH variant
MSTAIVTNVKHFGGMGSALRLSEAGHTVACHDESFKHQDELEAFAETYPQLIPMSEQEPAELIEAVTSALGHVDVLVSNDIAPVEWRPIDKYAVEDYRDTLEALQIKPFALVNAVASQMKKRKSGHIIFITSAAPFGPWKELSTYSSARAGASALANALSKELGEYNIPVFAIAPNYLHSGDSPYYYPSEPWKTSPEHVAHVRKVTALQRLGTQKELGELVTFLASGSCDYLTGQVFWLAGGFPVIERWPGMPE

SEQ ID NO: 892 - DNA, 768 bp, Artificial Sequence
  HHDH variant
  CDS (1)..(768)
atgagcaccgctattgtcaccaacgtcaaacattttggaggtatgggtagcgctctgcgtctgagcgaagctggtcataccgtcgcttgccatgatgaaagctttaagcatgttgatgaactagaagcttttgctgaaacctacccacagctgataccaatgagcgaacaggaaccagctgaactgattgaagctgtcaccagcgctcttggtcatgtcgatgtcctggtcagcaacgatatcgcgcctgtggaatggcggccaatcgataaatacgctgtcgaggattacagggatactgtcgaagctctgcagatcaagccatttgctctagtgaatgctgtcgcttcgcaaatgaagaagcgaaagtcggggcacatcatcttcatcacttcggctgccccgttcgggccatggaaggagctatcgacttactcttcggctcgagctggggctagtgcactagctaatgctctatcgaaggagctaggagagtacaatatcccggtgttcgctatcgctccgaattacctacactcgggggattcgccgtactattacccctctgagccgtggaagacttctccggagcacgtggctcacgtgcgtaaggtgactgctctacaacgactagggactcaaaaagagttgggggaattggtgacgtttttggcatctggctcttgtgattatttgactggccaggtgttttggttggcaggcggctttcccgtcatcgaacgttggcccggcatgcccgaataatga

SEQ ID NO: 893 - protein, 254 aa, Artificial Sequence
  HHDH variant
MSTAIVTNVKHFGGMGSALRLSEAGHTVACHDESFKHVDELEAFAETYPQLIPMSEQEPAELIEAVTSALGHVDVLVSNDIAPVEWRPIDKYAVEDYRDTVEALQIKPFALVNAVASQMKKRKSGHIIFITSAAPFGPWKELSTYSSARAGASALANALSKELGEYNIPVFAIAPNYLHSGDSPYYYPSEPWKTSPEHVAHVRKVTALQRLGTQKELGELVTFLASGSCDYLTGQVFWLAGGFPVIERWPGMPE

SEQ ID NO: 894 - DNA, 768 bp, Artificial Sequence
  HHDH variant
  CDS (1)..(768)
atgagcaccgctattgtcaccaacgtcaaacattttggaggtatgggtagcgctctgcgtctgagcgaagctggtcataccgtcgcttgccatgatgaaagctttaagcatcaggatgaactagaagcttttgctgaaacctacccacagctgataccaatgagcgaacaggaaccagctgaactgattgaagctgtcaccattgctcttggtcatgtcgatgtcctggtcagcaacgatatcgcgcctgtggaatggcggccaatcgataaatacgctgtcgaggattacagggatactgtcgaagctctgcagatcaagccatttgctctagtgaatgctgtcgcttcgcaaatgaagaagcgaaagtcggggcacatcatcttcatcacttcggctgccccgttcgggccatggaaggagctatcgacttactcttcggctcgagctggggctagtgcactagctaatgctctatcgaaggagctaggagagtacaatatcccggtgttcgctatcgctccgaattacctacactcgggggattcgccgtactattacccctctgagccgtggaagacttctccggagcacgtggctcacgtgcgtaaggtgactgctctacaacgactagggactcaaaaagagttgggagaattggtgacgtttttggcatctggctcttgtgattatttgactggccaggtgttttggttggcaggcggctttcccgtcatcgaacgttggcccggcatgcccgaataatga

SEQ ID NO: 895 - protein, 254 aa, Artificial Sequence
  HHDH variant
MSTAIVTNVKHFGGMGSALRLSEAGHTVACHDESFKHQDELEAFAETYPQLIPMSEQEPAELIEAVTIALGHVDVLVSNDIAPVEWRPIDKYAVEDYRDTVEALQIKPFALVNAVASQMKKRKSGHIIFITSAAPFGPWKELSTYSSARAGASALANALSKELGEYNIPVFAIAPNYLHSGDSPYYYPSEPWKTSPEHVAHVRKVTALQRLGTQKELGELVTFLASGSCDYLTGQVFWLAGGFPVIERWPGMPE

SEQ ID NO: 896 - DNA, 768 bp, Artificial Sequence
  HHDH variant
  CDS (1)..(768)
atgagcaccgctattgtcaccaacgtcaaacattttggaggtatgggtagcgctctgcgtctgagcgaagctggtcataccgtcgcttgccatgatgaaagctttaagcatcaggatgaactagaagcttttgctgaaacctacccacagctgataccaatgagcgaacaggaaccagctgaactgattgaagctgtcaccagcgctcttggtcatgtcgatgtcctggtcagcaacgatatcgcgcctgtggaatggcggccaatcgataaatacgctgtcgaggattacagggatactgtcgaagctctgcagatcaagccatttgctctagtgaatgctgtcgctcggcaaatgaagaagcgaaagtcggggcacatcatcttcatcacttcggctgccccgttcgggccatggaaggagctatcgacttactcttcggctcgagctggggctagtgcactagctaatgctctatcgaaggagctaggagagtacaatatcccggtgttcgctatcgctccgaattacctacactcgggggattcgccgtactattacccctctgagccgtggaagacttctccggagcacgtggctcacgtgcgtaaggtgactgctctacaacgactagggactcaaaaagagttgggggaattggtgacgtttttggcatctggctcttgtgattatttgactggccaggtgttttggttggcaggcggctttcccgtcatcgaacgttggcccggcatgcccgaataatga

SEQ ID NO: 897 - protein, 254 aa, Artificial Sequence
  HHDH variant
MSTAIVTNVKHFGGMGSALRLSEAGHTVACHDESFKHQDELEAFAETYPQLIPMSEQEPAELIEAVTSALGHVDVLVSNDIAPVEWRPIDKYAVEDYRDTVEALQIKPFALVNAVARQMKKRKSGHIIFITSAAPFGPWKELSTYSSARAGASALANALSKELGEYNIPVFAIAPNYLHSGDSPYYYPSEPWKTSPEHVAHVRKVTALQRLGTQKELGELVTFLASGSCDYLTGQVFWLAGGFPVIERWPGMPE

SEQ ID NO: 898 - DNA, 768 bp, Artificial Sequence
  HHDH variant
  CDS (1)..(768)
atgagcaccgctattgtcaccaacgtcaaacattttggaggtatgggtagcgctctgcgtctgagcgaagctggtcataccgtcgcttgccatgatgaaagctttaagcatcaggatgaactagaagcttttgctgaaacctacccacagctgataccaatgagcgaacaggaaccagctgaactgattgaagctgtcaccagcgctcttggtcatgtcgatgtcctggtcagcaacgatatcgcgcctgtggaatggcggccaatcgataaatacgctgtcgaggattacagggatactgtcgaagctctgcagatcaagccatttgctctagtgaatgctgtcgcttcgcaaatgaagaagcgaaagtcggggcacatcatcttcatcacttcggctgccccgttcgggccatggaaggagctatcgacttactcttcggctcgagctggggctagtgcactagctaatgctctatcgaaggagctaggagaatacaatatcccggtgttcgctatcgctccgaattacctacactcgggggattcgccgtactattacccctctgagccgtggaagacttctccggagcacgtggctcacgtgcgtaaggtgactgctctacaacgactagggactcaaaaagagttgggggaattggtgacgtttttggcatctggctcttgtgattatttgactggccaggtgttttggttgtcgggcggctttcccgtcatcgaacgttggcccggcatgcccgaataatga

SEQ ID NO: 899 - protein, 254 aa, Artificial Sequence
  HHDH variant
MSTAIVTNVKHFGGMGSALRLSEAGHTVACHDESFKHQDELEAFAETYPQLIPMSEQEPAELIEAVTSALGHVDVLVSNDIAPVEWRPIDKYAVEDYRDTVEALQIKPFALVNAVASQMKKRKSGHIIFITSAAPFGPWKELSTYSSARAGASALANALSKELGEYNIPVFAIAPNYLHSGDSPYYYPSEPWKTSPEHVAHVRKVTALQRLGTQKELGELVTFLASGSCDYLTGQVFWLSGGFPVIERWPGMPE

SEQ ID NO: 900 - DNA, 768 bp, Artificial Sequence
  HHDH variant
  CDS (1)..(768)
atgagcaccgctattgtcaccaacgtcaaacattttggaggtatggggagcgctctgcgtctgagcgaagctggtcataccgtcgcttgccatgatgaaagctttaagcatcaggatgaactagaagcttttgctgaaacctacccacagctgataccaatgagcgaacaggaaccagctgaactgattgaagctgtcaccagcgctcttggtcatgtcgatgtcctggtcagcaacgatatcgcgcctgtggaatggcggccaatcgataaatacgctgtcgaggattacagggatactgtcgaagctctgcagatcaagccatttgctctagtgaatgctgtcgcttcgcaaatgaagaagcgaaagtcggggcacatcatcttcatcacttcggctgccccgttcgggccatggaaggagctatcgacttactcttcggctcgagctggggctagtgcactagctaatgctctatcgaaggagctaggagagtacaatatcccggtgttcgctatcgctccgaattacctacactcgggggattcgccgtactattacccctctgagccgtggaagacttctccggagcacgtggctcacgtgcgtaaggtgactgctctacaacgactagggactcaaaaagagttgggggaattggtgacgtttttggcatctggctcttgtgattatttgactggccaggtgttttggttggcaggcggctttcccgtcatcgaacgttggcccagcatgcccgaataatga

SEQ ID NO: 901 - protein, 254 aa, Artificial Sequence
  HHDH variant
MSTAIVTNVKHFGGMGSALRLSEAGHTVACHDESFKHQDELEAFAETYPQLIPMSEQEPAELIEAVTSALGHVDVLVSNDIAPVEWRPIDKYAVEDYRDTVEALQIKPFALVNAVASQMKKRKSGHIIFITSAAPFGPWKELSTYSSARAGASALANALSKELGEYNIPVFAIAPNYLHSGDSPYYYPSEPWKTSPEHVAHVRKVTALQRLGTQKELGELVTFLASGSCDYLTGQVFWLAGGFPVIERWPSMPE

SEQ ID NO: 902 - DNA, 768 bp, Artificial Sequence
  HHDH variant
  CDS (1)..(768)
atgagcaccgctattgtcaccaacgtcaaacattttggaggtatgggtagcgctctgcgtctgagcgaagctggtcataccgtcgcttgccatgatgaaagctttaagcatcaggatgaactagaagcttttgctgaaacctacccacagctgataccaatgagcgaacaggaaccagctgaactgattgaagctgtcaccagcgctcttggtcatgtcgatgtcctggtcagcaacgatatcgcgcctgtggaatggcggccaatcgataaatacgctgtcgaggattacagggatactgtcgaagctctgcaggtcaagccatttgctctagtgaatgctgtcgcttcgcaaatgaagaagcgaaagtcggggcacatcatcttcatcacttcggctgccccgttcgggccatggaaggagctatcgacttactcttcggctcgagctggggctagtgcactagctaatgctctatcgaaggagctaggagagtacaatatcccggtgttcgctatcgctccgaattacctacactcgggggattcgccgtactattacccctctgagccgtggaagacttctccggagcacgtggctcacgtgcgtaaggtgactgctctacaacgactagggactcaaaaagagttgggggaattggtgacgtttttggcatctggctcttgtgattatttgactggccaggtgttttggttggcaggcggctttcccgtcatcgaacgttggcccggcatgcccgaataatga

SEQ ID NO: 903 - protein, 254 aa, Artificial Sequence
  HHDH variant
MSTAIVTNVKHFGGMGSALRLSEAGHTVACHDESFKHQDELEAFAETYPQLIPMSEQEPAELIEAVTSALGHVDVLVSNDIAPVEWRPIDKYAVEDYRDTVEALQVKPFALVNAVASQMKKRKSGHIIFITSAAPFGPWKELSTYSSARAGASALANALSKELGEYNIPVFAIAPNYLHSGDSPYYYPSEPWKTSPEHVAHVRKVTALQRLGTQKELGELVTFLASGSCDYLTGQVFWLAGGFPVIERWPGMPE

SEQ ID NO: 904 - DNA, 768 bp, Artificial Sequence
  HHDH variant
  CDS (1)..(768)
atgagcaccgctattgtcaccaacgtcaaacattttgggggtatgggtagcgctctgcgtctgagcgaagctggtcatgccgtcgcttgccatgatgaaagctttaagcatcaggatgaactagaagcttttgctgaaacctacccacagctgataccaatgagcgaacaggaaccagctgaactgattgaagctgtcaccagcgctcttggtcatgtcgatgtcctggtcagcaacgatatcgcgcctgtggaatggcggccaatcgataaatacgctgtcgaggattacagggatactgtcgaagctctgcagatcaagccatttgctctagtgaatgctgtcgcttcgcaaatgaagaagcgaaagtcggggcacatcatcttcatcacttcggctgccccgttcgggccatggaaggagctatcgacttactcttcggctcgagctggggctagtgcactagctaatgctctatcgaaggagctaggagagtacaatatcccggtgttcgctatcgctccgaattacctacactcgggggattcgccgtactattacccctctgagccgttgaagacttctccggagcacgtggctcacgtgcgtaaggtgactgctctacaacgactagggactcaaaaagagttgggggaattggtgacgtttttggcatctggctcttgtgattatttgactggccagttattttggttggcaggcggctttcccgtcatcgaacgttggcccgacatgcccgaataatga

SEQ ID NO: 905 - protein, 254 aa, Artificial Sequence
  HHDH variant
MSTAIVTNVKHFGGMGSALRLSEAGHAVACHDESFKHQDELEAFAETYPQLIPMSEQEPAELIEAVTSALGHVDVLVSNDIAPVEWRPIDKYAVEDYRDTVEALQIKPFALVNAVASQMKKRKSGHIIFITSAAPFGPWKELSTYSSARAGASALANALSKELGEYNIPVFAIAPNYLHSGDSPYYYPSEPLKTSPEHVAHVRKVTALQRLGTQKELGELVTFLASGSCDYLTGQLFWLAGGFPVIERWPDMPE

SEQ ID NO: 906 - DNA, 768 bp, Artificial Sequence
  HHDH variant
  CDS (1)..(768)
atgagcaccgctattgtcaccaacgtcaaacattttggaggtatgggtagcgctctgcgtctgagcgaagctggtcataccgtcgcttgccatgatgaaagctttaagcatcaggatgaactagaagcttttgctgaaacctacccacagctgataccaatgagcgaacaggaaccagctgaactgattgaagctgtcaccagcgctcttggtcatgtcgatgtcctggtcagcaacgatatcgcgcctgtggaatggcggccaatcgataaatacgctgtcgaggattacagggatactgtcgaagctctgcagatcaagccatttgctctagcgaatgctgtcgcttcgcaaatgaagaagcgaaagtcggggcacatcatcttcatcacttcggctgccccgttcgggccatggaaggagatctcgacttactcttcggctcgagctgggaccagtgcactagctaatgctctatcgaaggagctaggagagtacaatatcccggtgttcgctatcgctccgaattttctagactcgggggattcgccgtactattacccctctgagccgtggaagacttctccggagcacgtggctcacgtgcgtaaggtgactgctctacaacgactagggactcaaaaagagttgggggaattggtgacgtttttggcatctggctcttgtgattatttgactggccaggtgttttgtttggcaggcggctttcccgtcatcgaacgttggcccggcatgcccgaataatga

SEQ ID NO: 907 - protein, 254 aa, Artificial Sequence
  HHDH variant
MSTAIVTNVKHFGGMGSALRLSEAGHTVACHDESFKHQDELEAFAETYPQLIPMSEQEPAELIEAVTSALGHVDVLVSNDIAPVEWRPIDKYAVEDYRDTVEALQIKPFALANAVASQMKKRKSGHIIFITSAAPFGPWKEISTYSSARAGTSALANALSKELGEYNIPVFAIAPNFLDSGDSPYYYPSEPWKTSPEHVAHVRKVTALQRLGTQKELGELVTFLASGSCDYLTGQVFCLAGGFPVIERWPGMPE

SEQ ID NO: 908 - DNA, 768 bp, Artificial Sequence
  HHDH variant
  CDS (1)..(768)
atgagcaccgctattgtcaccaacgtcaaacattttggaggtatgggtagcgctctgcgtctgagcgaagctggtcataccgtcgcttgccatgatgaaagctttaagcatcatgatgaactagaagcttttgctgaaacctacccacagctgataccaatgagcgaacaggaaccagctgaactgattgaagctgtcaccagcgctcttggtcatgtcgatgtcctggtcagcaacgatatcgcgcctgtggaatggcggccaatcgataaatacgctgtcgaggattacagggatactgtcgaagctctgcagatcaagccatttgctctagtgaatgctgtcgcttcgcaaatgaagaagcgaaagtcggggcacatcatcttcatcacttcggctgccccgttcgggccatggaaggagctatcgacttactcttcggctcgagctggggctagtgcactagctaatgctctatcgaaggagctaggagagtacaatatcccggtgttcgctatcgctccgaattacctacactcgggggattcgccgtactattacccctctgagccgtggaagacttctccggagcacgtggctcacgtgcgtaaggtgactgctctacaacgactagggactcaaaaagagttgggggaattggtgacgtttttggcatctggctcttgtgattatttgactggccaggtgttttggttggcaggcggctttcccgtcatcgaacgttggcccggcatgcccgaataatga

SEQ ID NO: 909 - protein, 254 aa, Artificial Sequence
  HHDH variant
MSTAIVTNVKHFGGMGSALRLSEAGHTVACHDESFKHHDELEAFAETYPQLIPMSEQEPAELIEAVTSALGHVDVLVSNDIAPVEWRPIDKYAVEDYRDTVEALQIKPFALVNAVASQMKKRKSGHIIFITSAAPFGPWKELSTYSSARAGASALANALSKELGEYNIPVFAIAPNYLHSGDSPYYYPSEPWKTSPEHVAHVRKVTALQRLGTQKELGELVTFLASGSCDYLTGQVFWLAGGFPVIERWPGMPE

SEQ ID NO: 910 - DNA, 768 bp, Artificial Sequence
  HHDH variant
  CDS (1)..(768)
atgagcaccgctattgtcaccaacgtcaaacattttggaggtatgggtagcgctctgcgtctgagcgaagctggtcataccgtcgcttgccatgatgaaagctttaagcatcaggatgaactagaagcttttgctgaaacctacccacagctgataccaatgagcgaacaggaaccagctgaactgattgaagctgtcaccagcgctcttggtcatgtcgatgtcctggtcagcaacgatatcgcgcctgtggaatggcggccaatcgataaatacgctgtcgaggattacagggatactgtcgaagctctgcagatcaagccatttgctctagtgaatgctgtcgcttcgcaaatgaagaagcgaaagtcggggcacatcatcttcatcacttcggctgccccgttcgggccatggaaggagctatcgacttactcttcggctcgagctggggctagtgcactagctaatgctctatcgaaggagctaggagagtacaatatcccggtgttcgctatcgctccaaattacctacactcgggggattcgccgtactattacccctctgagccgtggaagacttctccggagcacgtggctcacgtgcgtaaggatactgctctacaacgactagggactcaaaaagagttgggggaattggtgacgtttttggcatctggctcttgtgattatttgactggccaggtgttttggttggcaggcggctttcccgtcatcgaacgttggcccggcatgcccgaataatga

SEQ ID NO: 911 - protein, 254 aa, Artificial Sequence
  HHDH variant
MSTAIVTNVKHFGGMGSALRLSEAGHTVACHDESFKHQDELEAFAETYPQLIPMSEQEPAELIEAVTSALGHVDVLVSNDIAPVEWRPIDKYAVEDYRDTVEALQIKPFALVNAVASQMKKRKSGHIIFITSAAPFGPWKELSTYSSARAGASALANALSKELGEYNIPVFAIAPNYLHSGDSPYYYPSEPWKTSPEHVAHVRKDTALQRLGTQKELGELVTFLASGSCDYLTGQVFWLAGGFPVIERWPGMPE

SEQ ID NO: 912 - DNA, 768 bp, Artificial Sequence
  HHDH variant
  CDS (1)..(768)
atgagcaccgctattgtcaccaacgtcaaacattttggaggtatgggtagcgctctgcgtctgagcgaagctggtcataccgtcgcttgccatgatgaaagctttaagcatcaggatgaactagaagcttttgctgaaacctacccacagctgataccaatgagcgaacaggaaccagctgaactgattgaagctgtcaccagcgctcttggtcatgtcgatgtcctggtcagcaacgatatcgcgcctgtggaatggcggccaatcgataaatacgctgtcgaggattacagggatactgtcgaagctctgcagatcaagccatttgctctagtgaatgctgtcgctacgcaaatgaagaagcgaaagtcggggcacatcatcttcatcacttcggctgccccgttcgggccatggaaggagctatcgacttactcttcggctcgagctggggctagtgcactagctaatgctctatcgaaggagctaggagagtacaatatcccggtgttcgctatcgctccgaattacctacactcgggggattcgccgtactattacccctctgagccgtggaagacttctccggagcacgtggctcacgtgcgtaaggtgactgctctacaacgactagggactcaaaaagagttgggggaattggtgacgtttttggcatctggctcttgtgattatttgaccggccaggtgttttggttggcaggcggctttcccgtcatcgaacgttggcccggcatgcccgaataatga

SEQ ID NO: 913 - protein, 254 aa, Artificial Sequence
  HHDH variant
MSTAIVTNVKHFGGMGSALRLSEAGHTVACHDESFKHQDELEAFAETYPQLIPMSEQEPAELIEAVTSALGHVDVLVSNDIAPVEWRPIDKYAVEDYRDTVEALQIKPFALVNAVATQMKKRKSGHIIFITSAAPFGPWKELSTYSSARAGASALANALSKELGEYNIPVFAIAPNYLHSGDSPYYYPSEPWKTSPEHVAHVRKVTALQRLGTQKELGELVTFLASGSCDYLTGQVFWLAGGFPVIERWPGMPE

SEQ ID NO: 914 - DNA, 768 bp, Artificial Sequence
  HHDH variant
  CDS (1)..(768)
atgagcaccgctattgtcaccaacgtcaaacattttggaggtatgggtagcgctctgcgtctgagcgaagctggtcataccgtcgcttgccatgatgaaagctttaagcatcaggatgaactagaagcttttgctgaaacctacccacagctgataccaatgagcgaacaggaacccgctgaactgattgaagctgtcaccagcgctcttggtcatgtcgatgtcctggtcagcaacgatatcgcgcctgtggaatggcggccaatcgataaatacgctgtcgaggattacagggatactgtcgaagctctgcagatcaagccatttgctctagtgaatgctgtcgcttcgcaaatgaagaagcgaaagtcggggcacatcatcttcatcacttcggctgccccgttcgggccatggaaggagctatcgacttactcttcggctcgagctggggctagtgcactagctaatgctctatcgaaggagctaggagagtacaatatcccggtgttcgctatcgctccgaattacctacactcgggggattcgccgtactattacccctctgagccgtggaagacttctccggagcacgtggctcacgtgcgtaaggtgactgctctacaacgactagggactcaaaaagagttgggggaattggtgacgtttttggcatctggctcttgtgattatttgactggccaggtgttttggttggcaggcggctttcccgtcatcgaacgttggcccagcatgcccgaataatga

SEQ ID NO: 915 - protein, 254 aa, Artificial Sequence; identical to SEQ ID NO: 901
  HHDH variant

SEQ ID NO: 916 - DNA, 768 bp, Artificial Sequence
  HHDH variant
  CDS (1)..(768)
atgagcaccgctattgtcaccaacgtcaaacattttggaggtatgggtagcgctctgcgtctgagcgaagctggtcataccgtcgcttgccatgatgaaagctttaagcatcaggatgaactagaagcttttgctgaaacctacccacagctgataccaatgagcgaacaggaaccagctgaactgattgaagctgtcaccagcgctcttggtcatgtcgatgtcctggtcagcaacgatatcgcgcctgtggaatggcggccaatcgataaatacgctgtcgaggattacagggatactgtcgaagctctgcagatcaagccatttgctctagtgaatgctgtcgcttcgcaaatgaagaagcgaaagtcggggcacatcatcttcatcacttcggctgccccgttcgggccatggaaggagctatcgacttactcttcggctcgagctggggctagtgcactagctaatgctctatcgaaggagctaggagagtacaatatcccggtgttcgctatcgctccgaattacctacactcgggggattcgccgtactattacccctctgagccgtggaagacttctccggagcacgtggctcacgtgcgtaaggtgactgctctacaacgactagggactcaaaaagagttgggggaattggtgacgtttttggcatctggctcttgtgattatttgactggccaggtgttttggttggcaggcggctttcccgtcatcgaacgttggcccagtatgcccgaataatga

SEQ ID NO: 917 - protein, 254 aa, Artificial Sequence; identical to SEQ ID NO: 901
  HHDH variant

SEQ ID NO: 918 - DNA, 768 bp, Artificial Sequence
  HHDH variant
  CDS (1)..(768)
atgagcaccgctattgtcaccaacgtcaaacattttggaggtatgggtagcgctctgcgtctgagcgaagctggtcataccgtcgcttgccatgatgaaagctttaagcatcaggatgaactagaagcttttgctgaaacctacccacagctgataccaatgagcgaacaggaaccagctgaactgattgaagctgtcaccagcgctcttggtcatgtcgatgtcctggtcagcaacgatatcgcgcctgtggaatggcggccaatcgataaatacgctgtcgaggattacagggatactgtcgaagctctgcagatcaagccatttgctctagtgaatgctgtcgcttcgcaaatgaagaagcgaaagtcggggcacatcatcttcatcacttcggctgccccgttcgggccatggaaggagctatcgtcgtactcttcggctcgagctggggctagtgcactagctaatgctctatcgaaggagctaggagagtacaatatcccggtgttcgctatcgctccgaattacctacactcgggggattcgccgtactattacccctctgagccgtggaagacttctccggagcacgtggctcacgtgcgtaaggtgactgctctacaacgactagggactcaaaaagagttgggggaattggtgacgtttttggcatctggctcttgtgattatttgactggccaggtgttttggttggcaggcggctttcccgtcatcgaacgttggcccggcatgcccgaataatga

SEQ ID NO: 919 - protein, 254 aa, Artificial Sequence
  HHDH variant
MSTAIVTNVKHFGGMGSALRLSEAGHTVACHDESFKHQDELEAFAETYPQLIPMSEQEPAELIEAVTSALGHVDVLVSNDIAPVEWRPIDKYAVEDYRDTVEALQIKPFALVNAVASQMKKRKSGHIIFITSAAPFGPWKELSSYSSARAGASALANALSKELGEYNIPVFAIAPNYLHSGDSPYYYPSEPWKTSPEHVAHVRKVTALQRLGTQKELGELVTFLASGSCDYLTGQVFWLAGGFPVIERWPGMPE

SEQ ID NO: 920 - DNA, 768 bp, Artificial Sequence
  HHDH variant
  CDS (1)..(768)
atgagcaccgctattgtcaccaacgtcaaacattttggaggtatgggtagcgctctgcgtctgagcgaagctggtcataccgtcgcttgccatgatgaaagctttaagcatcaggatgaactagaagcttttgctgaaacctacccacagctgataccaatgagcgaacaggaaccagctgaactgattgaagctgtcaccagcgctcttggtcatgtcgatgtcctggtcagcaacgatatcgcgcctgtggaatggcggccaatcgataaatacgctgtcgaggagtacagggatactgtcgaagctctgcagatcaagccatttgctctagtgaatgctgtcgcttcgcaaatgaagaagcgaaagtcggggcacatcatcttcatcacttcggctgccccgttcgggccatggaaggagctatcgacttactcttcggctcgagctggggctagtgcactagctaatgctctatcgaaggagctaggagagtacaatatcccggtgttcgctatcgctccgaattacctacactcgggggattcgccgtactattacccctctgagccgtggaagacttctccggagcacgtggctcacgtgcgtaaggtgactgctctacaacgactagggactcaaaaagagttgggggaattggtgacgtttttggcatctggctcttgtgattatttgactggccaggtgttttggttggcaggcggctttcccgtcatcgaacgttggcccggcatgcccgaataatga

SEQ ID NO: 921 - protein, 254 aa, Artificial Sequence
  HHDH variant
MSTAIVTNVKHFGGMGSALRLSEAGHTVACHDESFKHQDELEAFAETYPQLIPMSEQEPAELIEAVTSALGHVDVLVSNDIAPVEWRPIDKYAVEEYRDTVEALQIKPFALVNAVASQMKKRKSGHIIFITSAAPFGPWKELSTYSSARAGASALANALSKELGEYNIPVFAIAPNYLHSGDSPYYYPSEPWKTSPEHVAHVRKVTALQRLGTQKELGELVTFLASGSCDYLTGQVFWLAGGFPVIERWPGMPE

SEQ ID NO: 922 - DNA, 768 bp, Artificial Sequence
  HHDH variant
  CDS (1)..(768)
atgagcaccgctattgtcaccaacgtcaaacattttggaggtatgggcagcgctctgcgtctgagcgaagctggtcataccgtcgcttgccatgatgagagctttaagcatcaggatgaactagaagcttttgctgaaacctacccacagctgataccaatgagcgaacaggaaccagctgaactgattgaagctgtcaccagcgctcttggtcatgtcgatgtcctggtcagcaacgatatcgcgcctgtggaatggcggccaatcgataaatacgctgtcgaggattacagggatactgtcgaagctctgcagatcaagccatttgctctagtgaatgctgtcgcttcgcaaatgaagaagcgaaagtcggggcacatcatcttcatcacttcggctgccccgttcgggccatggaaggagctatcgacttactcttcggctcgagctggggctagtgcactagctaatgctctatcgaaggagctaggagagtacaatatcccggtgttcgctatcgctccgaattacctacacacgggggattcgccgtactattacccctctgagccgtggaagacttctccggagcacgtggctcacgtgcgtaaggtgactgctctacaacgactagggactcaaaaagagttgggggaattggtgacgtttttggcatctggctcttgtgattatttgactggccaggtgttttggttggcaggcggctttcccgtcatcgaacgttggcccggcatgcccgaataatga

SEQ ID NO: 923 - protein, 254 aa, Artificial Sequence
  HHDH variant
MSTAIVTNVKHFGGMGSALRLSEAGHTVACHDESFKHQDELEAFAETYPQLIPMSEQEPAELIEAVTSALGHVDVLVSNDIAPVEWRPIDKYAVEDYRDTVEALQIKPFALVNAVASQMKKRKSGHIIFITSAAPFGPWKELSTYSSARAGASALANALSKELGEYNIPVFAIAPNYLHTGDSPYYYPSEPWKTSPEHVAHVRKVTALQRLGTQKELGELVTFLASGSCDYLTGQVFWLAGGFPVIERWPGMPE

SEQ ID NO: 924 - DNA, 768 bp, Artificial Sequence
  HHDH variant
  CDS (1)..(768)
atgagcaccgctattgtcaccaacgtcaaacattttggaggtatgggtagcgctctgcgtctgagcgaagctggtcataccgtcgcttgccatgatgaaagctttaagcatcaggatgaactagaagcttttgctgaaacctacccacagctgataccaatgagcgaacaggaaccagctgaactgattgaagctgtcaccagcgctcttggtcatgtcgatgtcctggtcagcaacgatatcgcgcctgtggaatggcggccaatcgataaatacgctgtcgaggattacagggatactgtcgaagctctgcagatcaagccatttgctctagtgaatgctgtcgcttcgcaaatgaagaagcgaaagtcggggcacatcatcttcatcacttcggctgccccgttcggtccatggaaggagctatcgacttactcttcggctcgagctggggctagtgcactagctaatgctctatcgaaggagctaggagagtacaatatcccggtgttcgctatcgctccgaattacctacactcgggggattcgccgcactattacccctctgagccgtggaagacttctccggagcacgtggctcacgtgcgtaaggtgactgctctacaacgactagggactcaaaaagagttgggggaattggtgacgtttttggcatctggctcttgtgattatttgactggccaggtgttttggttggcaggcggctttcccgtcatcgaacgttggcccggcatgcccgaataatga

SEQ ID NO: 925 - protein, 254 aa, Artificial Sequence
  HHDH variant
MSTAIVTNVKHFGGMGSALRLSEAGHTVACHDESFKHQDELEAFAETYPQLIPMSEQEPAELIEAVTSALGHVDVLVSNDIAPVEWRPIDKYAVEDYRDTVEALQIKPFALVNAVASQMKKRKSGHIIFITSAAPFGPWKELSTYSSARAGASALANALSKELGEYNIPVFAIAPNYLHSGDSPHYYPSEPWKTSPEHVAHVRKVTALQRLGTQKELGELVTFLASGSCDYLTGQVFWLAGGFPVIERWPGMPE

SEQ ID NO: 926 - DNA, 768 bp, Artificial Sequence
  HHDH variant
  CDS (1)..(768)
atgagcaccgctattgtcaccaacgtcaaacattttggaggtatgggtagcgctctgcgtctgagcgaagctggtcataccgtcgcttgccatgatgaaagctttaagcatcaggatgaactagaagcttttgctgaaacctacccacagctgataccaatgagcgaacaggaaccagctgaactgattgaagctgtcaccagcgctcttggtcatgtcgatgtcctggtcagcaacgatatcgcgcctgtggaatggcggccaatcgataaatacgctgtcgaggattacagggatactgtcgaagctctgcagatcaagccatttgctctagtgaatgctgtcgcttcgcaaatgaagaagcgaaagtcggggcacatcatcttcatcacttcggctgccccgttcgggccatggaaggagctctcgacttactcttcggctcgtgctggggctagtgcactcgcgaatgctctctcgaaggagctgggcgagtacaatatcccggtgttcgctatcgctccgaattacctacactcgtgggattcgccgtactattacccctctgagccgtggaagacttctccggagcacgtggctcacgtgcgtaaggtgactgctctacaacgactagggactcaaaaagagttgggggaattggtgacgtttttggcatctggctcttgtgattatttgactggccaggtgttttggttggcaggcggctttcccgtcatcgaacgttggcccggcatgcccgaataatga

SEQ ID NO: 927 - protein, 254 aa, Artificial Sequence
  HHDH variant
MSTAIVTNVKHFGGMGSALRLSEAGHTVACHDESFKHQDELEAFAETYPQLIPMSEQEPAELIEAVTSALGHVDVLVSNDIAPVEWRPIDKYAVEDYRDTVEALQIKPFALVNAVASQMKKRKSGHIIFITSAAPFGPWKELSTYSSARAGASALANALSKELGEYNIPVFAIAPNYLHSWDSPYYYPSEPWKTSPEHVAHVRKVTALQRLGTQKELGELVTFLASGSCDYLTGQVFWLAGGFPVIERWPGMPE

SEQ ID NO: 928 - DNA, 768 bp, Artificial Sequence
  HHDH variant
  CDS (1)..(768)
atgagcaccgctattgtcaccaacgtcaaacattttggaggtatgggtagcgctctgcgtctgagcgaagctggtcataccgtcgcttgccatgatgaaagctttaagcatcaggatgaactagaagcttttgctgaaacctacccacagctgataccaatgagcgaacaggaaccagctgaactgattgaagctgtcaccggcgctcttggtcatgtcgatgtcctggtcagcaacgatatcgcgcctgtggaatggcggccaatcgataaatacgctgtcgaggattacagggatactgtcgaagctctgcagatcaagccatttgctctagtgaatgctgtcgcttcgcaaatgaagaagcgaaagtcggggcacatcatcttcatcacttcggctgccccgttcgggccatggaaggagctatcgacttactcttcggctcgagctggggctagtgcactagctaatgctctatcgaaggagctaggagagtacaatatcccggtgttcgctatcgctccgaattacctacactcgggggattcgccgtactattacccctctgagccgtggaagacttctccggagcacgtggctcacgtgcgtaaggtgactgctctacaacgactagggactcaaaaagagttgggggaattggtgacgtttttggcatctggctcttgtgattatttgactggccaggtgttttggttggcaggcggctttcccgtcatcgaacgttggcccggcatgcccgaataatga

SEQ ID NO: 929 - protein, 254 aa, Artificial Sequence
  HHDH variant
MSTAIVTNVKHFGGMGSALRLSEAGHTVACHDESFKHQDELEAFAETYPQLIPMSEQEPAELIEAVTGALGHVDVLVSNDIAPVEWRPIDKYAVEDYRDTVEALQIKPFALVNAVASQMKKRKSGHIIFITSAAPFGPWKELSTYSSARAGASALANALSKELGEYNIPVFAIAPNYLHSGDSPYYYPSEPWKTSPEHVAHVRKVTALQRLGTQKELGELVTFLASGSCDYLTGQVFWLAGGFPVIERWPGMPE

SEQ ID NO: 930 - DNA, 768 bp, Artificial Sequence
  HHDH variant
  CDS (1)..(768)
atgagcaccgctattgtcaccaacgtcaaacattttggaggtatgggtagcgctctgcgtctgagcgaagctggtcataccgtcgcttgccatgatgaaagctttaagcatcaggatgaactagaagcttttgctgaaacctacccacagctgataccaatgagcgaacaggaaccagctgaactgattgaagctgtcactagcgctcttggtcatgtcgatgtcctggtcagcaacgatatcgcgcctgtggaatggcggccaatcgataaatacgctatagaggattacagggatactgtcgaagctctgcagatcaagccatttgctctagtgaatgctgtcgcttcgcaaatgaagaagcgaaagtcggggcacatcatcttcatcacttcggctgccccgttcgggccatggaaggagctatcgacttactcttcggctcgagctggggctagtgcactagctaatgctctatcgaaggagctaggagagtacaatatcccggtgttcgctatcgctccgaattacctacactcgggggattcgccgtactattacccctctgagccgtggaagacttctccggagcacgtggctcacgtgcgtaaggtgactgctctacaacgactagggactcaaaaagagttgggggaattggtgacgtttttggcatctggctcttgtgattatttgactggccaggtgttttggttggcaggcggctttcccgtcatcgaacgttggcccggcatgcccgaataatga

SEQ ID NO: 931 - protein, 254 aa, Artificial Sequence
  HHDH variant
MSTAIVTNVKHFGGMGSALRLSEAGHTVACHDESFKHQDELEAFAETYPQLIPMSEQEPAELIEAVTSALGHVDVLVSNDIAPVEWRPIDKYAIEDYRDTVEALQIKPFALVNAVASQMKKRKSGHIIFITSAAPFGPWKELSTYSSARAGASALANALSKELGEYNIPVFAIAPNYLHSGDSPYYYPSEPWKTSPEHVAHVRKVTALQRLGTQKELGELVTFLASGSCDYLTGQVFWLAGGFPVIERWPGMPE

SEQ ID NO: 932 - DNA, 768 bp, Artificial Sequence
  HHDH variant
  CDS (1)..(768)
atgagcaccgctattgtcaccaacgtcaaacattttggaggtatgggtagcgctctgcgtctgagcgaagctggtcataccgtcgcttgccatgatgaaagctttaagcatcaggatgaactagaagcttttgctgaaacctacccacagctgataccaatgagcgaacaggaaccagctgaactgattgaagctgtcaccagcgctcttggtcatgtcgatgtcctggtcagcaacgatatcgcgcctgtggaatggcggccaatcgataaatacgctgtcgaggattacagggatactgtcgaagctctgcagatcaagccatttgctctagtgaatgctgtcgcttcgcaaatgaagaagcgaatgtcggggcacatcatcttcatcacttcggctgccccgttcgggccatggaaggagctatcgacttactcttcggctcgagctggggctagtgcactagctaatgctctatcgaaggagctaggagagtacaatatcccggtgttcgctatcgctccgaattacctacactcgggggattcgccgtactattacccctctgagccgtggaagacttctccggagcacgtggctcacgtgcgtaaggtgactgctctacaacgactagggactcaaaaagagttgggggaattggtgacgtttttggcatctggctcttgtgattatttgactggccaggtgttttggttggcaggcggctttcccgtcatcgaacgttggccccgtatgcccgaataatga

SEQ ID NO: 933 - protein, 254 aa, Artificial Sequence
  HHDH variant
MSTAIVTNVKHFGGMGSALRLSEAGHTVACHDESFKHQDELEAFAETYPQLIPMSEQEPAELIEAVTSALGHVDVLVSNDIAPVEWRPIDKYAVEDYRDTVEALQIKPFALVNAVASQMKKRMSGHIIFITSAAPFGPWKELSTYSSARAGASALANALSKELGEYNIPVFAIAPNYLHSGDSPYYYPSEPWKTSPEHVAHVRKVTALQRLGTQKELGELVTFLASGSCDYLTGQVFWLAGGFPVIERWPRMPE

SEQ ID NO: 934 - DNA, 768 bp, Artificial Sequence
  HHDH variant
  CDS (1)..(768)
atgagcaccgctattgtcaccaacgtcaaacattttggaggtatgggtagcgctctgcgtctgagcgaagctggtcataccgtcgcttgccatgatgaaagctttaagcatcaggatgaactagaagcttttgctgaaacctacccacagctgataccaatgagctaccaggaaccagctgaactgattgaagctgtcaccagcgctcttggtcatgtcgatgtcctggtcagcaacgatatcgcgcctgtggaatggcggccaatcgataaatacgctgtcgaggattacagggatactgtcgaagctctgcagatcaagccatttgctctagtgaatgctgtcgcttcgcaaatgaagaagcgaaagtcggggcacatcatcttcatcacttcggctgccccgttcgggccatggaaggagctatcgacttactcttcggctcgagctggggctagtgcactagctaatgctctatcgaaggagctaggagagtacaatatcccggtgttcgctatcgctccgaattacctacactcgggggattcgccgtactattacccctctgagccgtggaagacttctccggagcacgtggctcacgtgcgtaaggtgactgctctacaacgactagggactcaaaaagagttgggggaattggtgacgtttttggcatctggctcttgtgattatttgactggccaggtgttttggttggcaggcggctttcccgtcatcgaacgttggcccggcatgcccgaataatga

SEQ ID NO: 935 - protein, 254 aa, Artificial Sequence
  HHDH variant
MSTAIVTNVKHFGGMGSALRLSEAGHTVACHDESFKHQDELEAFAETYPQLIPMSYQEPAELIEAVTSALGHVDVLVSNDIAPVEWRPIDKYAVEDYRDTVEALQIKPFALVNAVASQMKKRKSGHIIFITSAAPFGPWKELSTYSSARAGASALANALSKELGEYNIPVFAIAPNYLHSGDSPYYYPSEPWKTSPEHVAHVRKVTALQRLGTQKELGELVTFLASGSCDYLTGQVFWLAGGFPVIERWPGMPE

SEQ ID NO: 936 - DNA, 768 bp, Artificial Sequence
  HHDH variant
  CDS (1)..(768)
atgagcaccgctattgtcaccaacgtcaaacattttggaggtatgggtagcgctctgcgtctgagcgaagccggtcataccgtcgcttgccatgatgaaagctttaagcatcaggatgaactagaagcttttgctgaaacctacccacagctgataccaatgagcgaacaggaaccagctgaactgattgaagctgtcaccagcgctcttggtcatgtcgatgtcctggtcagcaacgatatcgcgcctgtggaatggcggccaatcgataaatacgctgtcgaggattacagggatactgtcgaagctctgcagatcaagccatttgctctagtgaatgctgtcgcttcgcaaatgaagaagcgaaagtcggggcacatcatcttcatcacttcggctgccccgttcgggccatggaaggagctgtcgacttactcttcggctcgagcagggactagtgcacttgcaaatgctctgtcgaaggagctgggtgagtacaatatcccggtgttcgctatcgctccgaattacctacactcgggggattcgccgtactattacccctctgagccgtggaagacttctccggagcacgtggctcacgtgcgtaaggtgactgctctacaacgactagggactcaaaaagagttgggggaattggtgacgtttttggcatctggctcttgtgattatttgactggccaggtgttttggttggcaggcggctttcccgtcatcgaacgttggcccggcatgcccgaataatga

SEQ ID NO: 937 - protein, 254 aa, Artificial Sequence
  HHDH variant
MSTAIVTNVKHFGGMGSALRLSEAGHTVACHDESFKHQDELEAFAETYPQLIPMSEQEPAELIEAVTSALGHVDVLVSNDIAPVEWRPIDKYAVEDYRDTVEALQIKPFALVNAVASQMKKRKSGHIIFITSAAPFGPWKELSTYSSARAGTSALANALSKELGEYNIPVFAIAPNYLHSGDSPYYYPSEPWKTSPEHVAHVRKVTALQRLGTQKELGELVTFLASGSCDYLTGQVFWLAGGFPVIERWPGMPE

SEQ ID NO: 938 - DNA, 768 bp, Artificial Sequence
  HHDH variant
  CDS (1)..(768)
atgagcaccgctattgtcaccaacgtcaaacattttggaggtatgggtagcgctctgcgtctgagcgaagctggtcataccgtcgcttgccatgatgaaagctttaagcatcaggatgaactagaagcttttgctgaaacctacccacagctgataccaatgagcgaacaggaaccagctgaactgattgaagctgtcaccagcgctcttggtcatgtcgatgtcctggtcagcaacgatatcgcgcctgtggaatggcggccaatcgataaatacgctgtcgaggattacagggatactgtcgaagctctgcagatcaagccatttgctctagtgaatgctgtcgcttcgcaaatgaagaagcgaaagtcggggcacatcatcttcatcacttcggctgccccgttcgggccatggaaggagctgtcgacttactcttcggctcgcgctggggctagtgcccttgcgaatgctctttcgaaggagctgggcgagtacaatatcccggtgttcgctatcgctccgaattacctacactcgggggattcgccgtactattacccctctgagccgtggaagacctctccggagcacgtggctcacgtgcgtaaggtgactgctctacaacgactagggactcaaaaagagttgggggaattggtgacgtttttggcatctggctcttgtgattatttgactggccaggtgttttggttggcaggcggctttcccgtcgtcgaacgttggcccggcatgcccgaataatga

SEQ ID NO: 939 - protein, 254 aa, Artificial Sequence
  HHDH variant
MSTAIVTNVKHFGGMGSALRLSEAGHTVACHDESFKHQDELEAFAETYPQLIPMSEQEPAELIEAVTSALGHVDVLVSNDIAPVEWRPIDKYAVEDYRDTVEALQIKPFALVNAVASQMKKRKSGHIIFITSAAPFGPWKELSTYSSARAGASALANALSKELGEYNIPVFAIAPNYLHSGDSPYYYPSEPWKTSPEHVAHVRKVTALQRLGTQKELGELVTFLASGSCDYLTGQVFWLAGGFPVVERWPGMPE

SEQ ID NO: 940 - DNA, 768 bp, Artificial Sequence
  HHDH variant
  CDS (1)..(768)
atgagcaccgctattgtcaccaacgtcaaacattttggaggtatgggtagcgctctgcgtctgagcgaagctggtcataccgtcgcttgccatgatgaaagctttaagcatcaggatgaactagaagcttttgctgaaacctacccacagctgataccaatgagcgaacaggaaccagctgaactgattgaagctgtcaccagcgctcttggtcatgtcgatgtcctggtcagcaacgatatcgcgcctgtggaatggcggccaatcgataaatacgctgtcgaggattacagggatactgtcgaagctctgcagatcaagccatttgctctagtgaatgctgtcgcttcgcaaatgaagaagcgaaagtcggggcacatcatcttcatcacttcggctgccccgttcgggccatggaaggagctatcgacttactcttcggctcgagctggggctagtgcactagctaatgctctatcgaaggagctaggagagtacaatatcccggtgttcgctatcgctccgaattacctacactcgggggattcgccgtactattacccctctgagccgtggaagacttctccggagcacgtggctcacgtgcgtaaggtgactgctctacaacgactagggactcaaaaagagttgggggaattggtgacgtttttggcatctggctcttgtgatacgttgactggccaggtgttttggttggcaggcggctttcccgtcatcgaacgttggcccggcatgcccgaataatga

SEQ ID NO: 941 - protein, 254 aa, Artificial Sequence
  HHDH variant
MSTAIVTNVKHFGGMGSALRLSEAGHTVACHDESFKHQDELEAFAETYPQLIPMSEQEPAELIEAVTSALGHVDVLVSNDIAPVEWRPIDKYAVEDYRDTVEALQIKPFALVNAVASQMKKRKSGHIIFITSAAPFGPWKELSTYSSARAGASALANALSKELGEYNIPVFAIAPNYLHSGDSPYYYPSEPWKTSPEHVAHVRKVTALQRLGTQKELGELVTFLASGSCDTLTGQVFWLAGGFPVIERWPGMPE

SEQ ID NO: 942 - DNA, 768 bp, Artificial Sequence
  HHDH variant
  CDS (1)..(768)
atgagcaccgctattgtcaccaacgtcaaacagtttggaggtatgggtagcgctctgcgtctgagcgaagctggtcataccgtcgcttgccatgatgaaagctttaagcatcaggatgaactagaagcttttgctgaaacctacccacagctgataccaatgagcgaacaggaaccagctgaactaattgaagctgtcaccagcgctcttggtcatgtcgatgtcctggtcagcaacgatatcgcgcctgtggaatggcggccaatcgataaatacgctgtcgaggattacagggatactgtcgaagctctgcagatcaagccatttgctctagtgaatgctgtcgcttcgcaaatgaagaagcgaaagtcggggcacatcatcttcatcacttcggctgccccgttcgggccatggaaggagctatcgacttactcttcggctcgagctggggctagtgcactagctaatgctctatcgaaggagctaggagagtacaatatcccggtgttcgctatcgctccgaattacctacactcgggggattcgccgtactattacccctctgagccgtggaagacttctccggagcacgtggctcacgtgcgtaaggtgactgctctacaacgactagggactcaaaaagagttgggggaattggtgacgtttttggcatctggctcttgtgattatttgactggccaggtgttttggttggcaggcggctttcccgtcatcgaacgttggcccggcatgcccgaataatga

SEQ ID NO: 943 - protein, 254 aa, Artificial Sequence
  HHDH variant
MSTAIVTNVKQFGGMGSALRLSEAGHTVACHDESFKHQDELEAFAETYPQLIPMSEQEPAELIEAVTSALGHVDVLVSNDIAPVEWRPIDKYAVEDYRDTVEALQIKPFALVNAVASQMKKRKSGHIIFITSAAPFGPWKELSTYSSARAGASALANALSKELGEYNIPVFAIAPNYLHSGDSPYYYPSEPWKTSPEHVAHVRKVTALQRLGTQKELGELVTFLASGSCDYLTGQVFWLAGGFPVIERWPGMPE

SEQ ID NO: 944 - DNA, 768 bp, Artificial Sequence
  HHDH variant
  CDS (1)..(768)
atgagcaccgctattgtcaccaacgtcaaacattttggaggtatgggtagcgctctgcgtctgagcgaagctggtcataccgtcgcttgccatgatgaaagctttaagcatcaggatgaactagaagcttttgctgaaacctacccacagctgataccaatgagcgaacaggaaccagctgaactgattgaagctgtcaccagcgctcttggtcatgtcgatgtcctggtcagcaacgatatcgcgcctgtggaatggcggccaatcgataaatacgctgtcgaggattacaggggtactgtcgaagctctgcagatcaagccatttgctctagcgaatgctgtcgcttcgcaaatgaagaagcgaaagtcggggcacatcatcttcatcacttcggctgccccgttcgggccagacaaggagatctcgacttactcttcggctcgagctggggctagtgcactggctaatgctctatcgaaggagctaggagagtacaatatcccggtgttcgctatcgctccgcggtacctacactcagggaactcgccgtactattacccctctgagccgtggaagacttctccggagcacgtggctcacgtgcgtaaggtgactgctctacaacgactagggactcagaaagagttgggggaattggtgacgtttttggcatctggctcttgtgattatttgactggccaggtgttttggttggcaggcggctttcccgtcatcgaacgttggcccggcatgcccgaataatga

SEQ ID NO: 945 - protein, 254 aa, Artificial Sequence
  HHDH variant
MSTAIVTNVKHFGGMGSALRLSEAGHTVACHDESFKHQDELEAFAETYPQLIPMSEQEPAELIEAVTSALGHVDVLVSNDIAPVEWRPIDKYAVEDYRGTVEALQIKPFALANAVASQMKKRKSGHIIFITSAAPFGPDKEISTYSSARAGASALANALSKELGEYNIPVFAIAPRYLHSGNSPYYYPSEPWKTSPEHVAHVRKVTALQRLGTQKELGELVTFLASGSCDYLTGQVFWLAGGFPVIERWPGMPE

SEQ ID NO: 946 - DNA, 768 bp, Artificial Sequence
  HHDH variant
  CDS (1)..(768)
atgagcaccgctattgtcaccaacgtcaaacattttggaggtatgggtagcgctctgcgtctgagcgaagctggtcataccgtcgcttgccatgatgaaagctttaagcatcaggatgaactagccgcttttgctgaaacctacccacagctgataccaatgagcgaacaggaaccagctgaactgattgaagctgtcaccagcgctcttggtcatgtcgatgtcctggtcagcaacgatatcgcgcctgtggaatggcggccaatcgataaatacgctgtcgaggattacagggatactgtcgaagctctgcagatcaagccatttgctctagtgaatgctgtcgcttcgcaaatgaagaagcgaaagtcggggcacatcatcttcatcacttcggctgccccgttcgggccatggaaggagctatcgacttactcttcggctcgagctggggctagtgcactagctaatgctctatcgaaggagctaggagagtacaatatcccggtgttcgctatcgctccgaattacctacactcgggggattcgccgtactattacccctctgagccgtggaagacttctccggagcacgtggctcacgtgcgtaaggtgactgctctacaacgactagggactcaaaaagagttgggggaattggtgacgtttttggcatctggctcttgtgattatttgactggccaggtgttttggttggcaggcggctttcccgtcatcgaacgttggcccggcatgcccgaataatga

SEQ ID NO: 947 - protein, 254 aa, Artificial Sequence
  HHDH variant
MSTAIVTNVKHFGGMGSALRLSEAGHTVACHDESFKHQDELAAFAETYPQLIPMSEQEPAELIEAVTSALGHVDVLVSNDIAPVEWRPIDKYAVEDYRDTVEALQIKPFALVNAVASQMKKRKSGHIIFITSAAPFGPWKELSTYSSARAGASALANALSKELGEYNIPVFAIAPNYLHSGDSPYYYPSEPWKTSPEHVAHVRKVTALQRLGTQKELGELVTFLASGSCDYLTGQVFWLAGGFPVIERWPGMPE

SEQ ID NO: 948 - DNA, 768 bp, Artificial Sequence
  HHDH variant
  CDS (1)..(768)
atgagcaccgctattgtcaccaacgtcaaacattttggaggtatgggtagcgctctgcgtctgagcgaagctggtcataccgtcgcttgccatgatgaaagctttaagcatcaggatgaactagaagcttttgctgaaacctacccacagctgataccaatgagcgaacaggaaccagctgaactgattgaagctgtcaccagcgctcttggtcatgtcgatgtcctggtcagcaacgatatcgcgcctgtggaatggcggccaatcgataaatacgctgtcgaggattacagggatcaggtcgaagctctgcagatcaagccatttgctctagtgaatgctgtcgcttcgcaaatgaagaagcgaaagtcggggcacatcatcttcatcacttcggctgccccgttcgggccatggaaggagctatcgacttactcttcggctcgagctggggctagtgcactagctaatgctctatcgaaggagctaggagagtacaatatcccggtgttcgctatcgctccgaattacctacactcgggggattcgccgtactattacccctctgagccgtggaagacttctccggagcacgtggctcacgtgcgtaaggtgactgctctacaacgactagggactcaaaaagagttgggggaattggtgacgtttttggcatctggctcttgtgattatttgactggccaggtgttttggttggcaggcggctttcccgtcatcgaacgttggcccggcatgcccgaataatga

SEQ ID NO: 949 - protein, 254 aa, Artificial Sequence
  HHDH variant
MSTAIVTNVKHFGGMGSALRLSEAGHTVACHDESFKHQDELEAFAETYPQLIPMSEQEPAELIEAVTSALGHVDVLVSNDIAPVEWRPIDKYAVEDYRDQVEALQIKPFALVNAVASQMKKRKSGHIIFITSAAPFGPWKELSTYSSARAGASALANALSKELGEYNIPVFAIAPNYLHSGDSPYYYPSEPWKTSPEHVAHVRKVTALQRLGTQKELGELVTFLASGSCDYLTGQVFWLAGGFPVIERWPGMPE

SEQ ID NO: 950 - DNA, 768 bp, Artificial Sequence
  HHDH variant
  CDS (1)..(768)
atgagcaccgctattgtcaccaacgtcaaacattttggaggtatgggtagcgctctgcgtctgagcgaagctggtcataccgtcgcttgccatgatgaaagctttaagcatcaggatgaactagaagcttttgctgaaacctacccacagctgataccaatgagcgaacaggaaccagctgaactgattgaagctgtcaccagcgctcttggtcatgtcgatgtcctggtcagcaacgatatcgcgcctgtggaatggcggccaatcgataaatacgctgtcgaggattacagggatactgtcgaagctctgcagatcaagccatttgctctagtgaatgctgtcgcttcgcaaatgaagaagcgaaagtcggggcacatcatcttcatcacttcggctgccccgttcgggccatggaaggagctatcgacttactcttcggctcgagctggggctagtgcactagctaatgctctatcgaaggagctaggagagtacaatatcccggtgttcgctatcgctccgaattacctacactcgggggattcgccgtactattacccctctgagccgtggaagacttctccggagcacgtggctcacgtgcgtaagttaactgctctacaacgactagggactcaaaaagagttgggggaattggtgacgtttttggcatctggctcttgtgattatttgactggccaggtgttttggttggcaggcggctttcccgtcatcgaacgttggcccggcatgcccgaataatga

SEQ ID NO: 951 - protein, 254 aa, Artificial Sequence
  HHDH variant
MSTAIVTNVKHFGGMGSALRLSEAGHTVACHDESFKHQDELEAFAETYPQLIPMSEQEPAELIEAVTSALGHVDVLVSNDIAPVEWRPIDKYAVEDYRDTVEALQIKPFALVNAVASQMKKRKSGHIIFITSAAPFGPWKELSTYSSARAGASALANALSKELGEYNIPVFAIAPNYLHSGDSPYYYPSEPWKTSPEHVAHVRKLTALQRLGTQKELGELVTFLASGSCDYLTGQVFWLAGGFPVIERWPGMPE

SEQ ID NO: 952 - DNA, 768 bp, Artificial Sequence
  HHDH variant
  CDS (1)..(768)
atgagcaccgctattgtcaccaacgtcaaacattttggaggtatgggtagcgctctgcgtctgagcgaagctggtcataccgtcgcttgccatgatgaaagctttaagcatcaggatgaactagaagcttttgctgaaacctacccacagctgataccaatgagcgaacaggaaccagctgaactgattgaagctgtcaccagcgctcttggtcatgtcgatgtcctggtcagcaacgatatcgcgcctgtggaatggcggccaatcgataaatacgctgtcgaggattacagggatactgtcgaagctctgcagatcaagccatttgctctagtgaatgctgtcgcttcgcaaatgaagaagcgaaagtcggggcacatcatcttcatcacttcggctgccccgttcgggccatggaaggagctatcgacttactcttcggctcgagctggggctagtgcactagctaatgctctatcgaaggagctaggagagtacaatatcccggtgttcgctatcgctccgaattacctacactcgggggattcgccgtactattacccctctgagccgtggaagacttctccggagcacgtggcttatgtgcgtaaggtgactgctctacaacgactagggactcaaaaagagttgggggaattggtgacgtttttggcatctggctcttgtgattatttgactggccaggtgttttggttggcaggcggctttcccgtcatcgaacgttggcccggcatgcccgaataatga

SEQ ID NO: 953 - protein, 254 aa, Artificial Sequence
  HHDH variant
MSTAIVTNVKHFGGMGSALRLSEAGHTVACHDESFKHQDELEAFAETYPQLIPMSEQEPAELIEAVTSALGHVDVLVSNDIAPVEWRPIDKYAVEDYRDTVEALQIKPFALVNAVASQMKKRKSGHIIFITSAAPFGPWKELSTYSSARAGASALANALSKELGEYNIPVFAIAPNYLHSGDSPYYYPSEPWKTSPEHVAYVRKVTALQRLGTQKELGELVTFLASGSCDYLTGQVFWLAGGFPVIERWPGMPE

SEQ ID NO: 954 - DNA, 768 bp, Artificial Sequence
  HHDH variant
  CDS (1)..(768)
atgagcaccgctattgtcaccaacgtcaaacattttggaggtatgggtagcgctctgcgtctgagcgaagctggtcataccgtcgcttgccatgatgaaagctttaagcatcaggatgaactagaagcttttgctgaaacctacccacagctgataccaatgagcgaacaggaaccagctgaactgattgaagctgtcaccagcgctcttggtcatgtcgatgtcctggtcagcaacgatatcgcgcctgtggaatggcggccaatcgataaatacgctgtcgaggattacagggatactgtcgaagctctgcagatcaagccatttgctctagtgaatgctgtcgcttcgcaaatgaagaagcgaaagtcggggcacatcatcttcatcacttcggctgccccgttcgggccatggaaggagctatcgacttactcttcggctcgagctggggctagtgcactagctaatgctctatcgaaggagctaggagagtacaatatcccggtgttcgctatcgctccgaattacctacactcgggggattcgccgtactattacccctctgagccgtggaagacttctccggagcacgtggctcacgtgcgtaaggtgactgctctacaacgactagggactcaaaaagagttgggggaattggtgacgtttttggcatctggctcttgtgattatttgactggccaggtgtttacattggcaggcggctttcccgtcatcgaacgttggcccggcatgcccgaataatga

SEQ ID NO: 955 - protein, 254 aa, Artificial Sequence
  HHDH variant
MSTAIVTNVKHFGGMGSALRLSEAGHTVACHDESFKHQDELEAFAETYPQLIPMSEQEPAELIEAVTSALGHVDVLVSNDIAPVEWRPIDKYAVEDYRDTVEALQIKPFALVNAVASQMKKRKSGHIIFITSAAPFGPWKELSTYSSARAGASALANALSKELGEYNIPVFAIAPNYLHSGDSPYYYPSEPWKTSPEHVAHVRKVTALQRLGTQKELGELVTFLASGSCDYLTGQVFTLAGGFPVIERWPGMPE

SEQ ID NO: 956 - DNA, 768 bp, Artificial Sequence
  HHDH variant
  CDS (1)..(768)
atgagcaccgctattgtcaccaacgtcaaacattttggaggtatgggtagcgctctgcgtctgagcgaagctggtcataccgtcgcttgccatgatgaaagctttaagcatcaggatgaactagaagcttttgctgaaacctacccacagctgataccaatgagcgaacaggaaccagctgaactgattgaagctgtcaccagcgctcttggtcatgtcgatgtcctggtcagcaacgatatcgcgcctgtggaatggcggccaatcgataaatacgctgtcgagtgttacagggatactgtcgaagctctgcagatcaagccatttgctctagtgaatgctgtcgcttcgcaaatgaagaagcgaaagtcggggcacatcatcttcatcacttcggctgccccgttcgggccatggaaggagctatcgacttactcttcggctcgagctggggctagtgcactagctaatgctctatcgaaggagctaggagagtacaatatcccggtgttcgctatcgctccgaattacctacactcgggggattcgccgtactattacccctctgagccgtggaagacttctccggagcacgtggctcacgtgcgtaaggtgactgctctacaacgactagggactcaaaaagagttgggggaattggtgacgtttttggcatctggctcttgtgattatttgactggccaggtgttttggttggcaggcggctttcccgtcatcgaacgttggcccggcatgcccgaataatga

SEQ ID NO: 957 - protein, 254 aa, Artificial Sequence
  HHDH variant
MSTAIVTNVKHFGGMGSALRLSEAGHTVACHDESFKHQDELEAFAETYPQLIPMSEQEPAELIEAVTSALGHVDVLVSNDIAPVEWRPIDKYAVECYRDTVEALQIKPFALVNAVASQMKKRKSGHIIFITSAAPFGPWKELSTYSSARAGASALANALSKELGEYNIPVFAIAPNYLHSGDSPYYYPSEPWKTSPEHVAHVRKVTALQRLGTQKELGELVTFLASGSCDYLTGQVFWLAGGFPVIERWPGMPE

SEQ ID NO: 958 - DNA, 768 bp, Artificial Sequence
  HHDH variant
  CDS (1)..(768)
atgagcaccgctattgtcaccaacgtcaaacattttggaggtatgggtagcgctctgcgtctgagcgaagctggtcataccgtcgcttgccatgatgaaagctttaagcatcaggatgaactagaagcttttgctgaaacctacccacagctgataccaatgagcgaacaggaaccagctgaactgattgaagctgtcaccagcgctcttggtcatgtcgatgtcctggtcagcaacgatatcgcgcctgtggaatggcggccaatcgataaatacgctgtcgaggattacagggatactgtcgaagctctgcagatcaagccatttgctctagtgaatgctgtcgcttcgcaaatgaagaagcgaaagtcggggcacatcatcttcatcacttcggctgccccgttcgggccatggaaggagctatcgtcatactcttcggctcgagctggggctagtgcactagctaatgctctatcgaaggagctaggagagtacaatatcccggtgttcgctatcgctccgaattacctacactcgggggattcgccgtactattacccctctgagccgtggaagacttctccggagcacgtggctcacgtgcgtaaggtgactgctctacaacgactagggactcaaaaagagttgggggaattggtgacgtttttggcatctggctcttgtgattatttgactggccaggtgttttggttggcaggcggctttcccgtcaccgaacgttggcccggcatgcccgaataatga

SEQ ID NO: 959 - protein, 254 aa, Artificial Sequence
  HHDH variant
MSTAIVTNVKHFGGMGSALRLSEAGHTVACHDESFKHQDELEAFAETYPQLIPMSEQEPAELIEAVTSALGHVDVLVSNDIAPVEWRPIDKYAVEDYRDTVEALQIKPFALVNAVASQMKKRKSGHIIFITSAAPFGPWKELSSYSSARAGASALANALSKELGEYNIPVFAIAPNYLHSGDSPYYYPSEPWKTSPEHVAHVRKVTALQRLGTQKELGELVTFLASGSCDYLTGQVFWLAGGFPVTERWPGMPE

SEQ ID NO: 960 - DNA, 768 bp, Artificial Sequence
  HHDH variant
  CDS (1)..(768)
atgagcaccgctattgtcaccaacgtcaaacattttggaggtatgggtagcgctctgcgtctgagcgaagctggtcataccgtcgcttgccatgatgaaagctttaagcatcaggatgaactagaagcttttgctgaaacctacccacagctgataccaatgagcgaacaggaaccagctgaactgattgaagctgtcaccagcgctcttggtcatgtcgatgtcctggtcagcaacgatatcgcgcctgtggaatggcggccaatcgataaatacgctgtcgaggattacagggatactatcgaagctctgcagatcaagccatttgctctagtgaatgctgtcgcttcgcaaatgaagaagcgaaagtcggggcacatcatcttcatcacttcggctgccccgttcgggccatggaaggagctatcgacttactcttcggctcgagctggggctagtgcactagctaatgctctatcgaaggagctaggagagtacaatatcccggtgttcgctatcgctccgaatgcactacactcgggggattcgccgtactattacccctctgagccgtggaagacttctccggagcacgtggctcacgtgcgtaaggtgaccgctctacaacgactagggactcaaaaagagttgggggaattggtgacgtttttggcatctggctcttgtgattatttgactggccaggtgttttggttggcaggcggctttcccgtcatcgaacgttggcccggcatgcccgaataatga

SEQ ID NO: 961 - protein, 254 aa, Artificial Sequence
  HHDH variant
MSTAIVTNVKHFGGMGSALRLSEAGHTVACHDESFKHQDELEAFAETYPQLIPMSEQEPAELIEAVTSALGHVDVLVSNDIAPVEWRPIDKYAVEDYRDTIEALQIKPFALVNAVASQMKKRKSGHIIFITSAAPFGPWKELSTYSSARAGASALANALSKELGEYNIPVFAIAPNALHSGDSPYYYPSEPWKTSPEHVAHVRKVTALQRLGTQKELGELVTFLASGSCDYLTGQVFWLAGGFPVIERWPGMPE

SEQ ID NO: 962 - DNA, 768 bp, Artificial Sequence
  HHDH variant
  CDS (1)..(768)
atgagcaccgctattgtcaccaacgtcaaacattttggaggtatgggtagcgctctgcgtctgagcgaagctggtcataccgtcgcttgccatgatgaaagctttaagcatcaggatgaactagaagcttttgctgaaacctacccacagctgataccaatgagcgaacaggaaccagctgaactgattgaagctgtcaccagcgctcttggtcatgtcgatgtcctggtcagcaacgatatcgcgcctgtggaatggcggccaatcgataaatacgctgtcgaggattacagggatactgtcgaagctctgcagatcaagccatttgctctagtgaatgctgtcgcttcgcaaatgaagaagcgaaagtcggggcacatcatcttcatcacttcggctgccccgttcgggccatggggtgagctatcgacttactcttcggctcgagctggggctagtgcactagctaatgctctatcgaaggagctaggagagtacaatatcccggtgttcgctatcgctccgaattacctacactcgggggattcgccgtactattacccctctgagccgtggaagacttctccggagcacgtggctcacgtgcgtaaggtgactgctctacaacgactagggactcaaaaagagttgggggaattggtgacgtttttggcatctggctcttgtgattatttgactggccaggtgttttggttggcaggcggctttcccgtcatcgaacgttggcccggcatgcccgaataatga

SEQ ID NO: 963 - protein, 254 aa, Artificial Sequence
  HHDH variant
MSTAIVTNVKHFGGMGSALRLSEAGHTVACHDESFKHQDELEAFAETYPQLIPMSEQEPAELIEAVTSALGHVDVLVSNDIAPVEWRPIDKYAVEDYRDTVEALQIKPFALVNAVASQMKKRKSGHIIFITSAAPFGPWGELSTYSSARAGASALANALSKELGEYNIPVFAIAPNYLHSGDSPYYYPSEPWKTSPEHVAHVRKVTALQRLGTQKELGELVTFLASGSCDYLTGQVFWLAGGFPVIERWPGMPE

SEQ ID NO: 964 - DNA, 768 bp, Artificial Sequence
  HHDH variant
  CDS (1)..(768)
atgagcaccgctattgtcaccaacgtcaaacattttggaggtatgggtagcgctctgcgtctgagcgaagctggtcataccgtcgcttgccatgatgaaagctttaagcatcaggatgaactagaagcttttgctgaaacctacccacagctgataccaatgagcgaacaggaaccagctgaactgattgaagctgtcaccagcgctcttggtcatgtcgatgtcctggtcagcaacgatatcgcgcctgtggaatggcggccaatcgataaatacgctgtcgaggattacagggatactgtcgaagctctgcagatcaagccatttgctctagtgaatgctgtcgcttcgcaaatgaagaagcgaaagtcggggcacatcatcttcatcacttcggctgccccgttcgggccatggaaggagctatcgacttactcttcggctcgagctggggctagtgcactagctaatgctctatcgaaggagctaggagagtacaatatcccggtgttcgctatcgctccgaattgcctacactcgggggattcgccgtactattacccctctgagccgtggaagacttccccggagcacgtggctcacgtgcgtaaggtgactgctctacaacgactagggactcaaaaagagttgggggaattggtgacgtttttggcatctggctcttgtgattatttgactggccaggtgttttggttggcaggcggctttcccgtcatcgaacgttggcccggcatgcccgaataatga

SEQ ID NO: 965 - protein, 254 aa, Artificial Sequence
  HHDH variant
MSTAIVTNVKHFGGMGSALRLSEAGHTVACHDESFKHQDELEAFAETYPQLIPMSEQEPAELIEAVTSALGHVDVLVSNDIAPVEWRPIDKYAVEDYRDTVEALQIKPFALVNAVASQMKKRKSGHIIFITSAAPFGPWKELSTYSSARAGASALANALSKELGEYNIPVFAIAPNCLHSGDSPYYYPSEPWKTSPEHVAHVRKVTALQRLGTQKELGELVTFLASGSCDYLTGQVFWLAGGFPVIERWPGMPE

SEQ ID NO: 966 - DNA, 768 bp, Artificial Sequence
  HHDH variant
  CDS (1)..(768)
atgagcaccgctattgtcaccaacgtcaaacattttggaggtatgggtagcgctctgcgtctgagcgaagctggtcataccgtcgcttgccatgatgaaagctttaagcatcaggatgaactagaagcttttgctgaaacctacccacagctgataccaatgagcgaacaggaaccagctgaactgattgaagctgtcaccagcgctcttggtcatgtcgatgtcctggtcagcaacgatatcgcgcctgtggaatggcggccaatcgataaatacgctgtcgaggattacaggggtactgtcgaagctctgcagatcaagccatttgctctagcgaatgctgtcgcttcgcaaatgaagaagcgaaagtcggggcacatcatcttcatcacttcggctgccccgttcgggccagacaaggagatctcgacttactcttcggctcgagctggggctagtgcactagctaatgctctatcgaaggagctaggagagtacaatatcccggtgttcgctatcgctccgcggtacctacactcgggggattcgccgtactattacccctctgagccgtggaagacttctccggagcacgtggctcacgtgcgtaaggtgactgctctacaacgactagggactcaaaaagagttgggggaattggtgacgtttttggcatctggctcttgtgattatttgactggccaggtgttttggttggcaggcggctttcccgtcatcgaacgttggcccggcatgcccgaataatga

SEQ ID NO: 967 - protein, 254 aa, Artificial Sequence
  HHDH variant
MSTAIVTNVKHFGGMGSALRLSEAGHTVACHDESFKHQDELEAFAETYPQLIPMSEQEPAELIEAVTSALGHVDVLVSNDIAPVEWRPIDKYAVEDYRGTVEALQIKPFALANAVASQMKKRKSGHIIFITSAAPFGPDKEISTYSSARAGASALANALSKELGEYNIPVFAIAPRYLHSGDSPYYYPSEPWKTSPEHVAHVRKVTALQRLGTQKELGELVTFLASGSCDYLTGQVFWLAGGFPVIERWPGMPE

SEQ ID NO: 968 - DNA, 768 bp, Artificial Sequence
  HHDH variant
  CDS (1)..(768)
atgagcaccgctattgtcaccaacgtcaaacattttggaggtatgggtagcgctctgcgtctgagcgaagctggtcataccgtcgcttgccatgatgaaagctttaagcatcaggatgaactagaagcttttgctgaaacctacccacagctgataccaatgagcgaacaggaaccagctgaactgattgaagctgtcaccagcgctcttggtcatgtcgatgtcctggtcagcaacgatatcgcgcctgtggaatggcggccaatcgataaatacgctgtcgaggaatacagggatactgtcgaagctctgcagatcaagccatttgctctagcgaatgctgtcgcttcgcaaatgaagaagcgaaagtcggggcacatcatcttcatcacttcggctgccccgttcgggccatggaaggagctatcgacttactcttcggctcgagctggggctagtgcactagctaatgctctatcgaaggagctaggagagtacaatatcccggtgttcgctatcgctccgaattacctacactcgggggattcgccgtactattacccctctgagccgtggaagacttctccggagcacgtggctcacgtgcgtaaggtgactgctctacaacgactagggactcaaaaagagttgggggaattggtgacgtttttggcatctggctcttgtgattatttgactggccaggtgttttggtatgcaggcggctttcccgtcatcgaacgttggcccggcatgcccgaataatga

SEQ ID NO: 969 - protein, 254 aa, Artificial Sequence
  HHDH variant
MSTAIVTNVKHFGGMGSALRLSEAGHTVACHDESFKHQDELEAFAETYPQLIPMSEQEPAELIEAVTSALGHVDVLVSNDIAPVEWRPIDKYAVEEYRDTVEALQIKPFALANAVASQMKKRKSGHIIFITSAAPFGPWKELSTYSSARAGASALANALSKELGEYNIPVFAIAPNYLHSGDSPYYYPSEPWKTSPEHVAHVRKVTALQRLGTQKELGELVTFLASGSCDYLTGQVFWYAGGFPVIERWPGMPE

SEQ ID NO: 970 - DNA, 768 bp, Artificial Sequence
  HHDH variant
  CDS (1)..(768)
atgagcaccgctattgtcaccaacgtcaaacattttggaggtatgggtagcgctctgcgtctgagcgaagctggtcataccgtcgcttgccatgatgaaagctttaagcatcaggatgaactagaagcttttgctgaaacctacccacagctgataccaatgagcgaacaggaaccagctgaactgattgaagctgtcaccagcgctcttggtcatgtcgatgtcctggtcagcaacgatatcgcgcctgtggaatggcggccaatcgataaatacgctgtcgaggattacagggatactgtcgaagcttgtcagatcaagccatttgctctagtgaatgctgtcgcctcgcaaatgaagaagcgaaagtcggggcacatcatcttcatcacttcggctgccccgttcgggccatggaaggagctatcgacttactcttcggctcgagctggggctagtgcactagctaatgctctatcgaaggagctaggagagtacaatatcccggtgttcgctatcgctccgaattacctacactcgggggattcgccgtactattacccctctgagccgtggaagacttctccggagcacgtggctcacgtgcgtaaggtgactgctctacaacgactagggactcaaaaagagttgggggaattggtgacgtttttggcatctggctcttgtgattatttgactggccaggtgttttggttggcaggcggctttcccgtcatcgaacgttggcccggcatgcccgaataatga

SEQ ID NO: 971 - protein, 254 aa, Artificial Sequence
  HHDH variant
MSTAIVTNVKHFGGMGSALRLSEAGHTVACHDESFKHQDELEAFAETYPQLIPMSEQEPAELIEAVTSALGHVDVLVSNDIAPVEWRPIDKYAVEDYRDTVEACQIKPFALVNAVASQMKKRKSGHIIFITSAAPFGPWKELSTYSSARAGASALANALSKELGEYNIPVFAIAPNYLHSGDSPYYYPSEPWKTSPEHVAHVRKVTALQRLGTQKELGELVTFLASGSCDYLTGQVFWLAGGFPVIERWPGMPE

SEQ ID NO: 972 - DNA, 768 bp, Artificial Sequence
  HHDH variant
  CDS (1)..(768)
atgagcaccgctattgtcaccaacgtcaagcattttggaggtatgggtagcgctctgcgtttgagcgaagctggtcataccgtcgcttgccatgatgaaagctttaagcatcaggatgaactagaagcttttgctgaaacctacccacagctgataccaatgagcgaacaggaaccagctgaactgattgaagctgtcaccagcgctcttggtcatgtcgatgtcctggtcagcaacgatatcgcgcctgtggaatggcggccaatcgataaatacgctgtcgaggattacagggatactgtcgaagctctgcagatcaagccatttgctctagtgaatgctgtcgcttcgcaaatgaagaagcgaaagtcggggcacatcatcttcatcacttcagctgccccgttcgggccatggaaggagctatcgacttactcttcggctcgagctggggctagtgcactagctaatgctttgtcgaaggagctaggagagtacaatatcccggtgttcgctatcgctccgaattgcctacactcgggggattcgccgtactattacccctctgagccgtggaagacttctccggagcacgtggctcacgtgcgtaaggtgaccgctctacaacgactagggactcaaaaagagttgggggaattggtgacgttcttggcatctggctcttgtgattatttgactggccaggtgttttggttggcaggcggctttcccgtcatcgaacgttggcccggcatgcccgaataatga

SEQ ID NO: 973 - protein, 254 aa, Artificial Sequence; identical to SEQ ID NO: 965
  HHDH variant

SEQ ID NO: 974 - DNA, 768 bp, Artificial Sequence
  HHDH variant
  CDS (1)..(768)
atgagcaccgctattgtcaccaacgtcaaacattttggaggtatgggtagcgctctgcgtctgagcgaagctggtcataccgtcgcttgccatgatgaaagctttaagcatcaggatgaactagaagcttttgctgaaacctacccacagctgataccaatgagcgaacaggaaccagctgaactgattgaagctgtcaccagcgctcttggtcatgtcgatgtcctggtcagcaacgatatcgcgcctgtggaatggcggccaatcgataaatacgctgtcgaggattacagggatactgtcgaagctctgcagatcaagccatttgctctagtgaatgctgtcgcttcgcaaatgaagaagcgatcctcggggcacatcatcttcatcacttcggctgccccgttcgggccatggaaggagctatcgacttactcttcggctcgagctggggctagtgcactagctaatgctctatcgaaggagctaggagagtacaatatcccggtgttcgctatcgctccgaattacctacactcgggggattcgccgtactattacccctctgagccgtggaagacttctccggagcacgtggctcacgtgcgtaaggtgactgctctacaacgactagggactcaaaaagagttgggggaattggtgacgtttttggcatctggctcctgtgattatttgactggccaggtgtttcggttggcaggcggctttcccgtcatcgaacgttggcccggcatgcccgaataatga

SEQ ID NO: 975 - protein, 254 aa, Artificial Sequence
  HHDH variant
MSTAIVTNVKHFGGMGSALRLSEAGHTVACHDESFKHQDELEAFAETYPQLIPMSEQEPAELIEAVTSALGHVDVLVSNDIAPVEWRPIDKYAVEDYRDTVEALQIKPFALVNAVASQMKKRSSGHIIFITSAAPFGPWKELSTYSSARAGASALANALSKELGEYNIPVFAIAPNYLHSGDSPYYYPSEPWKTSPEHVAHVRKVTALQRLGTQKELGELVTFLASGSCDYLTGQVFRLAGGFPVIERWPGMPE

SEQ ID NO: 976 - DNA, 768 bp, Artificial Sequence
  HHDH variant
  CDS (1)..(768)
atgagcaccgctattgtcaccaacgtcaaacattttggaggtatgggtagcgctctgcgtctgagcgaagctggtcataccgtcgcttgccatgatgaaagctttaagcatacagatgaactagaagcttttgctgaaacctacccacagctgataccaatgagcgaacaggaaccagctgaactgattgaagctgtcaccagcgctcttggtcatgtcgatgtcctggtcagcaacgatatcgcgcctgtggaatggcggccaatcgataaatacgctgtcgaggattacagggatactgtcgaagctctgcagatcaagccatttgctctagtgaatgctgtcgcttcgcaaatgaagaagcgaaagtcggggcacatcatcttcatcacttcggctgccccgttcgggccatggaaggagctatcgacttactcttcggctcgagctggggctagtgcactagctaatgctctatcgaaggagctaggagagtacaatatcccggtgttcgctatcgctccgaattacctacactcgggggattcgccgtactattacccctctgagccgtggaagacttctccggagcacgtggctcacgtgcgtaaggtgactgctctacaacgactagggactcaaaaagagttgggggaattggtgacgtttttggcatctggctcttgtgattatttgactggccaggtgttttggttggcaggcggctttcccgtcatcgaacgttggcccggcatgcccgaataatga

SEQ ID NO: 977 - protein, 254 aa, Artificial Sequence
  HHDH variant
MSTAIVTNVKHFGGMGSALRLSEAGHTVACHDESFKHTDELEAFAETYPQLIPMSEQEPAELIEAVTSALGHVDVLVSNDIAPVEWRPIDKYAVEDYRDTVEALQIKPFALVNAVASQMKKRKSGHIIFITSAAPFGPWKELSTYSSARAGASALANALSKELGEYNIPVFAIAPNYLHSGDSPYYYPSEPWKTSPEHVAHVRKVTALQRLGTQKELGELVTFLASGSCDYLTGQVFWLAGGFPVIERWPGMPE

SEQ ID NO: 978 - DNA, 768 bp, Artificial Sequence
  HHDH variant
  CDS (1)..(768)
atgagcaccgctattgtcaccaacgtcaaacattttggaggtatgggtagcgctctgcgtctgagcgaagctggtcataccgtcgcttgccatgatgaaagctttaagcatcaggatgaactagaagcttttgctgaaacctacccacagctgataccaatgagcgaacaggaaccagctgaactgattgaagctgtcaccagcgctcttggtcatgtcgatgtcctggtcagcaacgatatcgcgcctgtggaatggcggccaatcgatagatacgctgtcgaggattacagggatactgtcgaagctctgcagatcaagccatttgctctagtgaatgctgtcgcttcgcaaatgaagaagcgaaagtcggggcacatcatcttcatcacttcggctgccccgttcgggccatggaaggagctatcgacttactcttcggctcgagctggggctagtgcactagctaatgctctatcgaaggagctaggagagtacaatatcccggtgttcgctatcgctccgaattacctacactcgggggattcgccgtactattacccctctgagccatggaagacttctccggagcacgtggctcacgtgcgtaaggtgactgctctacaacgactagggactcaaaaagagttgggggaattggtgacgtttttggcatctggctcttgtgattatttgactggccaggtgtttcgtttggcaggcggctttcccgtcatcgaacgttggcccggcatgcccgaataatga

SEQ ID NO: 979 - protein, 254 aa, Artificial Sequence
  HHDH variant
MSTAIVTNVKHFGGMGSALRLSEAGHTVACHDESFKHQDELEAFAETYPQLIPMSEQEPAELIEAVTSALGHVDVLVSNDIAPVEWRPIDRYAVEDYRDTVEALQIKPFALVNAVASQMKKRKSGHIIFITSAAPFGPWKELSTYSSARAGASALANALSKELGEYNIPVFAIAPNYLHSGDSPYYYPSEPWKTSPEHVAHVRKVTALQRLGTQKELGELVTFLASGSCDYLTGQVFRLAGGFPVIERWPGMPE

SEQ ID NO: 980 - DNA, 768 bp, Artificial Sequence
  HHDH variant
  CDS (1)..(768)
atgagcaccgctattgtcaccaacgtcaaacattttggaggtatgggtagcgctctgcgtctgagcgaagctggtcataccgtcgcttgccatgatgaaagctttaagcatcaggatgaactagaagcttttgctgaaacctacccacagctgataccaatgagcaaccaggaaccagctgaactgattgaagctgtcaccagcgctcttggtcatgtcgatgtcctggtcagcaacgatatcgcgcctgtggaatggcggccaatcgataaatacgctgtcgaggattacagggatactgtcgaagctctgcagatcaagccatttgctctagtgaatgctgtcgcttcgcaaatgaagaagcgaaagtcggggcacatcatcttcatcacttcggctgccccgttcgggccatggaaggagctatcgacttactcttcggctcgagctggggctagtgcactagctaatgctctatcgaaggagctaggagagtacaatatcccggtgttcgctatcgctccgaattacctacactcgggggattcgccgtactattacccctctgagccgtggaagacttctccggagcacgtggctcacgtgcgtaaggtgactgctctacaacgactagggactcaaaaagagttgggggaattggtgacgtttttggcatctggctcttgtgattatttgactggccaggtgttttggttggcaggcggctttcccgtcatcgaacgttggcccggcatgcccgaataatga

SEQ ID NO: 981 - protein, 254 aa, Artificial Sequence
  HHDH variant
MSTAIVTNVKHFGGMGSALRLSEAGHTVACHDESFKHQDELEAFAETYPQLIPMSNQEPAELIEAVTSALGHVDVLVSNDIAPVEWRPIDKYAVEDYRDTVEALQIKPFALVNAVASQMKKRKSGHIIFITSAAPFGPWKELSTYSSARAGASALANALSKELGEYNIPVFAIAPNYLHSGDSPYYYPSEPWKTSPEHVAHVRKVTALQRLGTQKELGELVTFLASGSCDYLTGQVFWLAGGFPVIERWPGMPE

SEQ ID NO: 982 - DNA, 768 bp, Artificial Sequence
  HHDH variant
  CDS (1)..(768)
atgagcaccgctattgtcaccaacgtcaaacattttggaggtatgggtagcgctctgcgtctgagcgaagctggtcataccgtcgcttgccatgatgaaagctttaagcatcaggatgaactagaagcttttgctgaaacctacccacagctgataccaatgagcgaacaggaaccagctgaactgattgaagctgtcaccagcgctcttggtgaggtcgatgtcctggtcagcaacgatatcgcgcctgtggaatggcggccaatcgataaatacgctgtcgaggattacagggatactgtcgaagctctgcagatcaagccatttgctctagtgaatgctgtcgcttcgcaaatgaagaagcgaaagtcggggcacatcatcttcatcacttcggctgccccgttcgggccatggaaggagctatcgacttactcttcggctcgagctggggctagtgcactagctaatgctctatcgaaggagctaggagagtacaatatcccggtgttcgctatcgctccgaattacctacactcgggggattcgccgtattattacccctctgagccgtggaagacttctccggagcacgtggctcacgtgcgtaaggtgactgctctacaacgactagggactcaaaaagagttgggggaattggtgacgtttttggcatctggctcttgtgattatttgactggccaggtgttttggttggcaggcggctttcccgtcatcgaacgttggcccggcatgcccgaataatga

SEQ ID NO: 983 - protein, 254 aa, Artificial Sequence
  HHDH variant
MSTAIVTNVKHFGGMGSALRLSEAGHTVACHDESFKHQDELEAFAETYPQLIPMSEQEPAELIEAVTSALGEVDVLVSNDIAPVEWRPIDKYAVEDYRDTVEALQIKPFALVNAVASQMKKRKSGHIIFITSAAPFGPWKELSTYSSARAGASALANALSKELGEYNIPVFAIAPNYLHSGDSPYYYPSEPWKTSPEHVAHVRKVTALQRLGTQKELGELVTFLASGSCDYLTGQVFWLAGGFPVIERWPGMPE

SEQ ID NO: 984 - DNA, 768 bp, Artificial Sequence
  HHDH variant
  CDS (1)..(768)
atgagcaccgctattgtcaccaacgtcaaacattttggaggtatgggtagcgctctgcgtctgagcgaagctggtcataccgtcgcttgccatgatgaaagcttttcgcatcaggatgaactagaagcttttgctgaaacctacccacagctgataccaatgagcgaacaggaaccagctgaactgattgaagctgtcaccagcgctcttggtcatgtcgatgtcctggtcagcaacgatatcgcgcctgtggaatggcggccaatcgataaatacgctgtcgaggattacagggatactgtcgaagctctgcagatcaagccatttgctctagtgaatgctgtcgcttcgcaaatgaagaagcgaaagtcggggcacatcatcttcatcacttcggctgccccgttcgggccatggaaggagctatcgacttactcttcggctcgagctggggctagtgcactagctaatgctctatcgaaggagctaggagagtacaatatcccggtgttcgctatcgctccgaattacctacactcgggggattcgccgtactattacccctctgagccgtggaagacttctccggagcacgtggctcacgtgcgtaaggtgactgctctacaacgactagggactcaaaaagagttgggggaattggtgacgtttttggcatctggctcttgtgattatttgactggccaggtgttttggttggcaggcggctttcccgtcatcgaacgttggcccggcatgcccgaataatga

SEQ ID NO: 985 - protein, 254 aa, Artificial Sequence
  HHDH variant
MSTAIVTNVKHFGGMGSALRLSEAGHTVACHDESFSHQDELEAFAETYPQLIPMSEQEPAELIEAVTSALGHVDVLVSNDIAPVEWRPIDKYAVEDYRDTVEALQIKPFALVNAVASQMKKRKSGHIIFITSAAPFGPWKELSTYSSARAGASALANALSKELGEYNIPVFAIAPNYLHSGDSPYYYPSEPWKTSPEHVAHVRKVTALQRLGTQKELGELVTFLASGSCDYLTGQVFWLAGGFPVIERWPGMPE

SEQ ID NO: 986 - DNA, 768 bp, Artificial Sequence
  HHDH variant
  CDS (1)..(768)
atgagcaccgctattgtcaccaacgtcaaacattttggaggtatgggtagcgctctgcgtctgagcgaagctggtcataccgtcgcttgccatgatgaaagctttaagcatcaggatgaactagaagcttttgctgaaacctacccacagctgacaccaatgagcgaacaggaaccagctgaactgattgaagctgtcaccagtgctcttggtcatgtcgatgtcctggtcagcaacgatatcgcgcctgtggaatggcggccaatcgataaatacgctgtcgaggattacagggatactgtcgaagctctgcagatcaagccatttgctctagtgaatgctgtcgcttcgcaaatgaagaagcgaaagtcggggcacatcatcttcatcacttcggctgccccgttcgggccatggaaggagctgtcgacttactcttcggctcgtgctggggctagtgcacttgcgaatgctctatcgaaggagctaggagagtacaatatcccggtgttcgctatcgctccgaattacctacactcggaggattcgccgtactattacccctctgagccgtggaagacttctccggagcacgtggctcacgtgcgtaaggtgactgctctacaacgactagggactcaaaaagagttgggggaattggtgacgtttttggcatctggctcttgtgattatttgactggccaggtgttttggttggcaggcggctttcccgtcatcgaacgttggcccggcatgcccgaataatga

SEQ ID NO: 987 - protein, 254 aa, Artificial Sequence
  HHDH variant
MSTAIVTNVKHFGGMGSALRLSEAGHTVACHDESFKHQDELEAFAETYPQLTPMSEQEPAELIEAVTSALGHVDVLVSNDIAPVEWRPIDKYAVEDYRDTVEALQIKPFALVNAVASQMKKRKSGHIIFITSAAPFGPWKELSTYSSARAGASALANALSKELGEYNIPVFAIAPNYLHSEDSPYYYPSEPWKTSPEHVAHVRKVTALQRLGTQKELGELVTFLASGSCDYLTGQVFWLAGGFPVIERWPGMPE

SEQ ID NO: 988 - DNA, 768 bp, Artificial Sequence
  HHDH variant
  CDS (1)..(768)
atgagcaccgcaattgtcaccaacgtcaagcattttggaggtatgggtagcgctctgcgtctgagcgaagctggtcataccgtcgcttgccatgatgaaagctttaagcatcaggatgaactagaagcttttgctgaaacctacccacagctgataccaatgagcgaacaggaaccagctgaactgattgaagctgtcaccagcgctcttggtcatgtcgatgtcctggtcagcaacgatatcgcgcctgtggaatggcggccaatcgataaatacgctgtcgaggattacagggatactgtcgaagctctgcagatcaagccatttgctctagtgaatgctgtcgcttcgcaaatgaagaagcgaaagtcggggcacatcatcttcatcacttcagctgccccgttcgggccatggaaggagctatcgacttactcttcggctcgagctggggctagtgcactagctaatgctttgtcgaaggagctaggagagtacaatatcccggtgttcgctatcgctccgaattgcctacactcgggggattcgccgtactattacccctctgagccgtggaagacttctccggagcacgtggctcacgtgcgtaaggtgactgctctacaacgactagggactcaaaaagagttgggggaattggtgacgttcttggcatctggctcttgtgattatttgactggccaggtgttttggttggcaggcggctttcccgtcatcgaacgttggcccggcatgcccgaataatga

SEQ ID NO: 989 - protein, 254 aa, Artificial Sequence; identical to SEQ ID NO: 965
  HHDH variant

SEQ ID NO: 990 - DNA, 768 bp, Artificial Sequence
  HHDH variant
  CDS (1)..(768)
atgagcaccgctattgtcaccaacgtcaaacattttggaggtatgggtagcgctctgcgtctgagcgaagctggtcataccgtcgcttgccatgatgaaagctttaagcatcaggatgaactagaagcttttgctgaaacctacccacagctgataccaatgagcgaacaggaaccagctgaactgattgaagctgtcaccagcgctcttggtcatgtcgatgtcctggtcagcaacgatatcgcgcccgtggaatggcggccaatcgataaatacgctgtcgaggattacagggatactgtcgaagctctgcagatcaagccatttgctctagtgaatgctgtcgcttcgcaaatgaagaagcgaaagtcggggcacatcatcttcatcacttcggctgccccgttcgggccatggaaggagctatcgacttactcttcggctcgagctggggctagtgcactagctaatgctctatcgaaggagctaggagagtacaatatcccggtgttcgctatcgctccgaattacctacactcgggggattcgccgtactattacccctctgagccgtggaagacttctccggagcacgtggctcacgtgcgtaaggtgactgctctacaacgactagggactcaaaaagagttgggggaattggtgacgtttttggcatctggcaattgtgattatttgactggccaggtgttttggttggcaggcggctttcccgtcatcgaacgttggcccggcatgcccgaataatga

SEQ ID NO: 991 - protein, 254 aa, Artificial Sequence
  HHDH variant
MSTAIVTNVKHFGGMGSALRLSEAGHTVACHDESFKHQDELEAFAETYPQLIPMSEQEPAELIEAVTSALGHVDVLVSNDIAPVEWRPIDKYAVEDYRDTVEALQIKPFALVNAVASQMKKRKSGHIIFITSAAPFGPWKELSTYSSARAGASALANALSKELGEYNIPVFAIAPNYLHSGDSPYYYPSEPWKTSPEHVAHVRKVTALQRLGTQKELGELVTFLASGNCDYLTGQVFWLAGGFPVIERWPGMPE

SEQ ID NO: 992 - DNA, 768 bp, Artificial Sequence
  HHDH variant
  misc_feature: S01619196
  CDS (1)..(768)
atgagcaccgctattgtcaccaacgtcaaacattttggaggtatgggtagcgctctgcgtctgagcgaagctggtcataccgtcgcttgccatgatgaaagctttaagcatcaggatgaactagaagcttttgctgaaacctacccacagctgataccaatgagcgaacaggaaccagctgaactgattgaagctgtcaccagcgctcttggtcatgtcgatgtcctggtcagcaacgatatcgcgcctgtggaatggcggccaatcgataaatacgctgtcgaggattacagggatactgtcgaagctctgcagatcaagccatttgctctagtgaatcaagtcgcttcgcaaatgaagaagcgaaagtcggggcacatcatcttcatcacttcggctgccccgttcgggccatggaaggagctatcgacttactcttcggctcgagctggggctagtgcactagctaatgctctatcgaaggagctaggagagtacaatatcccggtgttcgctatcgctccgaattacctacactcgggggattcgccgtactattacccctctgagccgtggaagacttctccggagcacgtggctcacgtgcgtaaggtgactgctctacaacgactagggactcaaaaagagttgggggaattggtgacgtttttggcatctggctcttgtgattatttgactggccaggtgttttggttggcaggcggctttcccgtcatcgaacgttggcccggcatgcccgaataatga

SEQ ID NO: 993 - protein, 254 aa, Artificial Sequence
  HHDH variant
MSTAIVTNVKHFGGMGSALRLSEAGHTVACHDESFKHQDELEAFAETYPQLIPMSEQEPAELIEAVTSALGHVDVLVSNDIAPVEWRPIDKYAVEDYRDTVEALQIKPFALVNQVASQMKKRKSGHIIFITSAAPFGPWKELSTYSSARAGASALANALSKELGEYNIPVFAIAPNYLHSGDSPYYYPSEPWKTSPEHVAHVRKVTALQRLGTQKELGELVTFLASGSCDYLTGQVFWLAGGFPVIERWPGMPE

SEQ ID NO: 994 - DNA, 768 bp, Artificial Sequence
  HHDH variant
  CDS (1)..(768)
atgagcaccgctattgtcaccaacgtcaaacattttggaggtatgggtagcgctctgcgtctgagcgaagctggtcataccgtcgcttgccatgatgaaagctttaagcatcaggatgaactagaagcttttgctgaaacctacccacagctgataccaatgagcgaacaggaaccagctgaactgattgaagctgtcaccagcgctcttggtcatgtcgatgtcctggtcagcaacgatatcgcgcctgtggaatggcggccaatcgataaatacgctgtcgaggattacagggatactgtcgaagctctgctaatcaagccatttgctctagtgaatgctgtcgcttcgcaaatgaagaagcgaaagtcggggcacatcatcttcatcacttcggctgccccgttcgggccatggaaggagctatcgacctactcttcggctcgagctggggctagtgcactagctaatgctctatcgaaggagctaggagagtacaatatcccggtgttcgctatcgctccgaattacctacactcgggggattcgccgtactattacccctctgagccgtggaagacttctccggagcacgtggctcacgtgcgtaaggtgactgctctacaacgactagggactcaaaaagagttgggggaattggtgacgtttttggcatctggctcttgtgattatttgactggccaggtgttttggttggcaggcggctttcccgtcatcgaacgttggcccggcatgcccgaataatga

SEQ ID NO: 995 - protein, 254 aa, Artificial Sequence
  HHDH variant
MSTAIVTNVKHFGGMGSALRLSEAGHTVACHDESFKHQDELEAFAETYPQLIPMSEQEPAELIEAVTSALGHVDVLVSNDIAPVEWRPIDKYAVEDYRDTVEALLIKPFALVNAVASQMKKRKSGHIIFITSAAPFGPWKELSTYSSARAGASALANALSKELGEYNIPVFAIAPNYLHSGDSPYYYPSEPWKTSPEHVAHVRKVTALQRLGTQKELGELVTFLASGSCDYLTGQVFWLAGGFPVIERWPGMPE

SEQ ID NO: 996 - DNA, 768 bp, Artificial Sequence
  HHDH variant
  CDS (1)..(768)
atgagcaccgctattgtcaccaacgtcaaacattttggaggtatgggtagcgctctgcgtctgagcgaagctggtcataccgtcgcttgccatgatgaaagctttaagcatcaggatgaactagaagcttttgctgaaacctacccacagctgataccaatgagcgaacaggaaccagctgaactgattgaagctgtcaccagcgctcttggtcatgtcgatgtcctggtcagcaacgatatcgcgcctgtggaatggcggccaatcgataaatacgctgtcgaggattacagggatactgtcgaagctctgcagatcaagccatttgctctagtgaatgctgtcgcttcgcaaatgaagaagcgaaagtcggggcacatcatcttcatcacttcggctgccccgttcgggccatggaaggagctatcgacttactcttcggctcgagctggggctagtgcactagctaatgctctatcgaaggagctaggagagtacaatatcccggtgttcgctatcgctccgaattacctacactcgggggattcgccgtactattacccctctgagccgtggaagacttctccggagcacgtggctcacgtgcgtaagagtactgctctacaacgactagggactcaaaaagagttgggggaattggtgacgtttttggcatctggctcttgtgattatttgactggccaggtgttttggttggcaggcggctttcccgtcatcgaacgttggcccggcatgcccgaataatga

SEQ ID NO: 997 - protein, 254 aa, Artificial Sequence
  HHDH variant
MSTAIVTNVKHFGGMGSALRLSEAGHTVACHDESFKHQDELEAFAETYPQLIPMSEQEPAELIEAVTSALGHVDVLVSNDIAPVEWRPIDKYAVEDYRDTVEALQIKPFALVNAVASQMKKRKSGHIIFITSAAPFGPWKELSTYSSARAGASALANALSKELGEYNIPVFAIAPNYLHSGDSPYYYPSEPWKTSPEHVAHVRKSTALQRLGTQKELGELVTFLASGSCDYLTGQVFWLAGGFPVIERWPGMPE

SEQ ID NO: 998 - DNA, 768 bp, Artificial Sequence
  HHDH variant
  CDS (1)..(768)
atgagcaccgctattgtcaccaacgtcaagcattttggaggtatgggtagcgctctgcgtctgagcgaagctggtcataccgtcgcttgccatgatgaaagctttaagcatcaggatgaactagaagcttttgctgaaacctacccacagctgataccaatgagcgaacaggaaccagctgaactgattgaagctgtcaccagcgctcttggtcatgtcgatgtcctggtcagcaatgatatcgcgcctgtggaatggcggccaatcgataaatacgctgtcgaggattacagggatactgtcgaagctctgcagatcaagccatttgctctagtgaatgctgtcgcttcgcaaatgaagaagcgaaagtcggggcatatcatcttcatcacttcagctgccccgttcgggccatggaaggagctatcgacttactcttcggctcgagctggggctagtgcactagctaatgctttgtcgaaggagctaggagagtacaatatcccggtgttcgctatcgctccgaattacctacactcggggaattcgccgtactattacccctctgagccgtggaagacttctccggagcacgtggctcacgtgcgtaaggtgactgctctacaacgactagggactcaaaaagagttgggagaattggtgacgttcttggcatctggctcttgtgattatttgactggccaggtgttttggttggcaggcggctttcccgtcatcgaacgttggcccggcatgcccgaataatga

SEQ ID NO: 999 - protein, 254 aa, Artificial Sequence
  HHDH variant
MSTAIVTNVKHFGGMGSALRLSEAGHTVACHDESFKHQDELEAFAETYPQLIPMSEQEPAELIEAVTSALGHVDVLVSNDIAPVEWRPIDKYAVEDYRDTVEALQIKPFALVNAVASQMKKRKSGHIIFITSAAPFGPWKELSTYSSARAGASALANALSKELGEYNIPVFAIAPNYLHSGNSPYYYPSEPWKTSPEHVAHVRKVTALQRLGTQKELGELVTFLASGSCDYLTGQVFWLAGGFPVIERWPGMPE

SEQ ID NO: 1000 - DNA, 768 bp, Artificial Sequence
  HHDH variant
  CDS (1)..(768)
atgagcaccgctattgtcaccaacgtcaaacattttggaggtatgggtagcgctctgcgtctgagcgaggctggtcataccgtcgcttgccatgatgaaagctttaagcatcaggatgaactggaagcttttgctgaaacctacccacagctgataccaatgagcgaacaggaaccagctgaactgattgaagctgtcaccagcgctcttggtcatgtcgatgtcctggtcagcaacgatatcgcgcctgtggaatggcggccaatcgataaatacgctgtcgaggattacagggatactgtcgaagctctgcagatcaagccatttgctctagtgaatgctgtcgcttcgcaaatgaagaagcgaaagtcggggcacatcatcttcatcacttcggctgccccgttcgggccatggaaggagctatcgacttactcttcggctcgagctggggctagtgcactagctaatgctctatcgaaggagctaggagagtacaatatcccggtgttcgctatcgctccgaattacctacactcgggggattcgccgtactattacccctctgagccgtggaagacttctccggagcacgtggctcacgtgcgtaagacgactgctctacaacgactagggactcaaaaagagttgggggaattggtgacgtttttggcatctggctcttgtgattatttgactggccaggtgttttggttggcaggcggctttcccgtcatcgaacgttggcccggcatgcccgaataatga

SEQ ID NO: 1001 - protein, 254 aa, Artificial Sequence; identical to SEQ ID NO: 880
  HHDH variant

SEQ ID NO: 1002 - DNA, 768 bp, Artificial Sequence
  HHDH variant
  CDS (1)..(768)
atgagcaccgctattgtcaccaacgtcaaacattttggaggtatgggtagcgctctgcgtctgagcgaagctggtcataccgtcgcttgccatgatgaaagctttaagcatcaggatgaactagaagcttttgctgaaacctacccacagctgataccaatgagcgaacaggaaccagctgaactgattgaagctgtcaccagcgctcttggtcatgtcgatgtcctggtcagcaacgatatcgcgcctgtggaatggcggccaatcgataaatacgctgtcgaggattacagggatactgtcgaagctctgcagatcaagccatttgctctagtgaatgctgtcgcttcgcaaatgaagaagcgaaagtcggggcacatcatcttcatcacttcggctgccccgttcgggccatggaaggagctatcgacttactcttcggctcgagctggggctagtgcactagctaatgctctatcgaaggagctaggagagtacaatatcccggtgttcgctatcgctccgaattacctacactcgggggattcgccgtactattacccctctgagccgtggaagacttctccggagcacgtggctcacgtgcgtaagctgactgctctacaacgactagggactcaaaaagagttgggggaattggtgacgtttttggcatctggctcttgtgattatttgactggccaggtgttttggttggcaggcggctttcccgtcatcgaacgttggcccggcatgcccgaataatga

SEQ ID NO: 1003 - protein, 254 aa, Artificial Sequence; identical to SEQ ID NO: 951
  HHDH variant

SEQ ID NO: 1004 - DNA, 768 bp, Artificial Sequence
  HHDH variant
  CDS (1)..(768)
atgagcaccgctattgtcaccaacgtcaaacattttggaggtatgggtagcgctctgcgtctgagcgaagctggtcataccgtcgcttgccatgatgaaagctttaagcatcaggatgaactagaagcttttgctgaaacctacccacagctgataccaatgagcgaacaggaaccagctgaactgattgaagctgtcaccagcgctcttggtcatgtcgatgtcctggtcagcaacgatatcgcgcctgtggaatggactccaatcgataaatacgctgtcgaggattacagggatactgtcgaagctctgcagatcaagccatttgctctagtgaatgctgtcgcttcgcaaatgaagaagcgaaagtcggggcacatcatcttcatcacttcggctgccccgttcgggccatggaaggagctatcgacttactcttcggctcgagctggggctagtgcactagctaatgctctatcgaaggagctaggagagtacaatatcccggtgttcgctatcgctccgaattacctacactcgggggattcgccgtactattacccctctgagccgtggaagacttctccggagcacgtggctcacgtgcgtaaggtgactgctctacaacgactagggactcaaaaagagttgggggaattggtgacgtttttggcatctggctcttgtgattatttgactggccaggtgttttggttggcaggcggctttcccgtcatcgaacgttggcccggcatgcccgaataatga

SEQ ID NO: 1005 - protein, 254 aa, Artificial Sequence
  HHDH variant
MSTAIVTNVKHFGGMGSALRLSEAGHTVACHDESFKHQDELEAFAETYPQLIPMSEQEPAELIEAVTSALGHVDVLVSNDIAPVEWTPIDKYAVEDYRDTVEALQIKPFALVNAVASQMKKRKSGHIIFITSAAPFGPWKELSTYSSARAGASALANALSKELGEYNIPVFAIAPNYLHSGDSPYYYPSEPWKTSPEHVAHVRKVTALQRLGTQKELGELVTFLASGSCDYLTGQVFWLAGGFPVIERWPGMPE

SEQ ID NO: 1006 - DNA, 768 bp, Artificial Sequence
  HHDH variant
  CDS (1)..(768)
atgagcaccgctattgtcaccaacgtcaaacattttggaggtatgggtagcgctctgcgtctgagcgaagctggtcataccgtcgcttgccatgatgaaagctttaagcatcaggatgaactagaagcttttgctgaaacctacccacagctgataccaatgagcgaacaggaaccagctgaactgattgaagctgtcaccagcgctcttggtcatgtcgatgtcctggtcagcaacgatatcgcgcctgtggaatggcggccaatcgataaatacgctgtcgaggattacagggatactgtcgaagctctgcagatcaagccatttgctctagtgaatgctgttgcttcgcaaatgaagaagcgaaagtcggggcacatcatcttcatcacttcggctgccccgttcgggccatggaaggagctatcgacttactcttcggctcgagctggggctagtgcactagctaatgctctatcgaaggagctaggagagtacaatatcccggtgttcgctatcgctccgaattacctacacacgggggattcgccgtactattacccctctgagccgtggaagacttctccggagcacgtggctcacgtgcgtaaggtgactgctctacaacgactagggactcaaaaagagttgggggaattggtgacgtttttggcatctggctcttgtgattatttgactggccaggtgttttggttggcaggcggctttcccgtcatcgaacgttggcccggcatgcccgaataatga

SEQ ID NO: 1007 - protein, 254 aa, Artificial Sequence; identical to SEQ ID NO: 923
  HHDH variant

SEQ ID NO: 1008 - DNA, 768 bp, Artificial Sequence
  HHDH variant
  CDS (1)..(768)
atgagcaccgctattgtcaccaacgtcaaacattttggaggtatgggtagcgctctgcgtctgagcgaagctggtcataccgtcgcttgccatgatgaaagctttaagcatcaggatgaactagaagcttttgctgaaacctacccacagctgataccaatgagcgaacaggaaccagctgaactgattgaagctgtcaccagcgctcttggtcatgtcgatgtcctggtcagcaacgatatcgcgcctgtggaatggcggccaatcgataaatacgctgtcgaggactacagggatactgtcgaagctctgcagatcaagccatttgctctagtgaatgctgtcgcttcgcaaatgaagaagcgaaagtcggggcacatcatcttcatcacttcggctgccccgttcgggccatggaaggagctatcgtcttactcttcggctcgagctggggctagtgcactagctaatgctctatcgaaggagctaggagagtacaatatcccggtgttcgctatcgctccgaattacctacactcgggggattcgccgtactattacccctctgagccgtggaagacttctccggagcacgtggctcacgtgcgtaaggtgactgctctacaacgactagggactcaaaaagagttgggggaattggtgacgtttttggcatctggctcttgtgattatttgactggccaggtgttttggttggcaggcggctttcccgtcatcgaacgttggcccggcatgcccgaataatga

SEQ ID NO: 1009 - protein, 254 aa, Artificial Sequence; identical to SEQ ID NO: 919
  HHDH variant

SEQ ID NO: 1010 - DNA, 768 bp, Artificial Sequence
  HHDH variant
  CDS (1)..(768)
atgagcaccgctattgtcaccaacgtcaaacattttggaggtatgggtagcgctctgcgtctgagcgaagctggtcataccgtcgcttgccatgatgaaagctttaagcatcaggatgaactagaagcttttgctgaaacctacccacagctgataccaatgagcgaacaggaaccagctgaactgattgaagctgtcaccagcgctcttggtcatgtcgatgtcctggtcagcaacgatatcgcgcctgtggaatggcggccaatcgataaatacgctgtcgaggattacagggatactgtcgaagctctgcagatcaagccatttgctctagtgaatgctgtcgcttcgcaaatgaagaagcgaaagtcggggcacatcatcttcatcacttcggctgccccgttcgggccatggaaggagctatcgacttactcttcggctcgagctggggctagtgcactagctaatgctctatcgaaggagctaggagagtacaatatcccggtgttcgctatcgctccgaattacctaaattcgggggattcgccgtactattacccctctgagccgtggaagacttctccggagcacgtggctcacgtgcgtaaggtgactgctctacaacgactagggactcaaaaagagttgggggaattggtgacgtttttggcatctggctcttgtgattatttgactggccaggtgttttggttggcaggcggctttcccgtcatcgaacgttggcccggcatgcccgaataatga

SEQ ID NO: 1011 - protein, 254 aa, Artificial Sequence
  HHDH variant
MSTAIVTNVKHFGGMGSALRLSEAGHTVACHDESFKHQDELEAFAETYPQLIPMSEQEPAELIEAVTSALGHVDVLVSNDIAPVEWRPIDKYAVEDYRDTVEALQIKPFALVNAVASQMKKRKSGHIIFITSAAPFGPWKELSTYSSARAGASALANALSKELGEYNIPVFAIAPNYLNSGDSPYYYPSEPWKTSPEHVAHVRKVTALQRLGTQKELGELVTFLASGSCDYLTGQVFWLAGGFPVIERWPGMPE

SEQ ID NO: 1012 - DNA, 768 bp, Artificial Sequence
  HHDH variant
  CDS (1)..(768)
atgagcaccgctattgtcaccaacgtcaaacattttggaggtatgggtagcgctctgcgtctgagcgaagctggtcataccgtcgcttgccatgatgaaagctttaagcatcaggatgaactagaagcttttgctgaaacctacccacagctgataccaatgagcgaacaggaaccagctgaactgattgaagctgtcaccagcgctcttggtcatgtcgatgtcctggtcagcaacgatatcgcgcctgtggaatggcggccaatcgataaatacgctgtcgaggattacagggatactgtcgaagctctgcagatcaagccatttgctctagtgaatgctgtcgcttcgcaaatgaagaagcgaaagtcggggcacatcatcttcatcacttcggctgccccgttcgggccatggaaggagctatcgacttactcttcggctcgagctggggctagtgcactagctaatgctctatcgaaggagctaggagagtacaatatcccggtgttcgctatcgctccgaattacctacactcgggggattcgccgtactattacccctctgagccgtggaagacttctccggagcacgtggctcacgtgcgcagggtgactgctctacaacgactagggactcaaaaagagttgggggaattggtgacgtttttggcatctggctcttgtgattatttgactggccaggtgttttggttggcaggcggctttcccgtcatcgaacgttggcccggcatgcccgaataatga

SEQ ID NO: 1013 - protein, 254 aa, Artificial Sequence
  HHDH variant
MSTAIVTNVKHFGGMGSALRLSEAGHTVACHDESFKHQDELEAFAETYPQLIPMSEQEPAELIEAVTSALGHVDVLVSNDIAPVEWRPIDKYAVEDYRDTVEALQIKPFALVNAVASQMKKRKSGHIIFITSAAPFGPWKELSTYSSARAGASALANALSKELGEYNIPVFAIAPNYLHSGDSPYYYPSEPWKTSPEHVAHVRRVTALQRLGTQKELGELVTFLASGSCDYLTGQVFWLAGGFPVIERWPGMPE

SEQ ID NO: 1014 - DNA, 768 bp, Artificial Sequence
  HHDH variant
  CDS (1)..(768)
atgagcaccgctattgtcaccaacgtcaaacattttggaggtatgggtagcgctctgcgtctgagcgaagctggtcataccgtcgcttgccatgatgaaagctttaagcatcaggatgaactagaagcttttgctgaaacctacccacagctgataccaatgagcgaacaggaaccagctgaactgattgaagctgtcaccagcgctcttggtcatgtcgatgtcctggtcagcaacgatatcgcgcctgtggaatggcggccaatcgataaatacgctgtcgagaagtacagggatactgtcgaagctctgcagatcaagccatttgctctagtgaatgctgtcgcttcgcaaatgaagaagcgaaagtcggggcacatcatcttcatcacttcggctgccccgttcgggccatggaaggagctatcgacttactcttcggctcgagctggggctagtgcactagctaatgctctatcgaaggagctaggagagtacaatatcccggtgttcgctatcgctccgaattacctacactcgggggattcgccgtactattacccctctgagccgtggaagacttctccggagcacgtggctcacgtgcgtaaggtgactgcactacaacgactagggactcaaaaagagttgggggaattggtgacgtttttggcatctggctcttgtgattatttgactggccaggtgttttggttggcaggcggctttcccgtcatcgaacgttggcccggcatgcccgaataatga

SEQ ID NO: 1015 - protein, 254 aa, Artificial Sequence
  HHDH variant
MSTAIVTNVKHFGGMGSALRLSEAGHTVACHDESFKHQDELEAFAETYPQLIPMSEQEPAELIEAVTSALGHVDVLVSNDIAPVEWRPIDKYAVEKYRDTVEALQIKPFALVNAVASQMKKRKSGHIIFITSAAPFGPWKELSTYSSARAGASALANALSKELGEYNIPVFAIAPNYLHSGDSPYYYPSEPWKTSPEHVAHVRKVTALQRLGTQKELGELVTFLASGSCDYLTGQVFWLAGGFPVIERWPGMPE

SEQ ID NO: 1016 - DNA, 768 bp, Artificial Sequence
  HHDH variant
  CDS (1)..(768)
atgagcaccgctattgtcaccaacgtcaaacattttggaggtatgggtagcgctctgcgtctgagcgaagctggtcataccgtcgcttgccatgatgaaagctttaagcatcaggatgaactagaagcttttgctgaaacctacccacagctgataccaatgagcgaacaggaaccagctgaactgattgaagctgtcaccagcgctcttggtcatgtcgatgtcctggtcagcaacgatatcgcgcctgtggaatggcggccaatcgataaatacgctgtcgaggattacagggatcaggtcgaagctctgcagatcaagccatttgctctggtgaatgctgtcgcttcgcaaatgaagaagcgaaagtcggggcacatcatcttcatcacttcggctgccccgttcgggccatggaaggagctatcgacttactcttcggctcgagctggggctagtgcactagctaatgctctatcgaaggagctaggagagtacaatatcccggtgttcgctatcgctccgaattacctacactcgggggattcgccgtactattacccctctgagccgtggaagacttctccggagcacgtggctcacgtgcgtaaggtgactgctctacaacgactagggactcaaaaagagttgggggaattggtgacgtttttggcatctggctcttgtgattatttgactggccaggtgttttggttggcaggcggctttcccgtcatcgaacgttggcccggcatgcccgaataatga

SEQ ID NO: 1017 - protein, 254 aa, Artificial Sequence; identical to SEQ ID NO: 949
  HHDH variant

SEQ ID NO: 1018 - DNA, 768 bp, Artificial Sequence
  HHDH variant
  CDS (1)..(768)
atgagcaccgctattgtcaccaacgtcaaacattttggaggtatgggtagcgctctgcgtctgagcgaagctggtcataccgtcgcttgccatgatgaaagctttaagcatcaggatgaactagaagcttttgctgaaacctacccacagctgataccaatgagcgaacaggaaccagctgaactgattgaagctgtcaccagcgctcttggtcatgtcgatgtcctggtcagcaacgatatcgcgcctgtggaatggcggccaatcgataaatacgctgtcgaggattacagggatactgtcgaagctctgcagatcaagccatttgctctagtgaatgctgtcgcttcgcatatgaagaagcgaaagtcggggcacatcatcttcatcacttcggctgccccgttcgggccatggaaggagctatcgacttactcttcggctcgagctggggctagtgcactagctaatgctctatcgaaggagctaggagagtacaatatcccggtgttcgctatcgctccgaattacctacactcgggggattcgccgtactattacccctctgagccgtggaagacttctccggagcacgtggctcacgtgcgtaaggtgactgctctacaacgactagggactcaaaaagagttgggggaattggtgacgtttttggcatctggctcttgtgattatttgactggccaggtgttttggttggcaggcggctttcccgtcatcgaacgttggcccggcatgcccgaacaatga

SEQ ID NO: 1019 - protein, 255 aa, Artificial Sequence
  HHDH variant
MSTAIVTNVKHFGGMGSALRLSEAGHTVACHDESFKHQDELEAFAETYPQLIPMSEQEPAELIEAVTSALGHVDVLVSNDIAPVEWRPIDKYAVEDYRDTVEALQIKPFALVNAVASHMKKRKSGHIIFITSAAPFGPWKELSTYSSARAGASALANALSKELGEYNIPVFAIAPNYLHSGDSPYYYPSEPWKTSPEHVAHVRKVTALQRLGTQKELGELVTFLASGSCDYLTGQVFWLAGGFPVIERWPGMPEQ

SEQ ID NO: 1020 - DNA, 768 bp, Artificial Sequence
  HHDH variant
  CDS (1)..(768)
atgagcaccgctattgtcaccaacgtcaaacattttggaggtatgggtagcgctctgcgtctgagcgaagctggtcataccgtcgcttgccatgatgaaagctttaagcatcaggatgaactagaagcttttgctaccacctacccacagctgataccaatgagcgaacaggaaccagctgaactgattgaagctgtcaccagcgctcttggtcatgtcgatgtcctggtcagcaacgatatcgcgcctgtggaatggcggccaatcgataaatacgctgtcgaggattacagggatactgtcgaagctctgcagatcaagccatttgctctagtgaatgctgtcgcttcgcaaatgaagaagcgaaagtcggggcacatcatcttcatcacttcggctgccccgttcgggccatggaaggagctatcgacttactcttcggctcgagctggggctagtgcactagctaatgctctatcgaaggagctaggagagtacaatatcccggtgttcgctatcgctccgaattacctacactcgggggattcgccgtactattacccctctgagccgtggaagacttctccggagcacgtggctcacgtgcgtaaggtgactgctctacaacgactagggactcaaaaagagttgggggaattggtgacgtttttggcatctggctcttgtgattatttgactggccaggtgttttggttggcaggcggctttcccgtcatcgaacgttggcccggcatgcccgaataatga

SEQ ID NO: 1021 - protein, 254 aa, Artificial Sequence
  HHDH variant
MSTAIVTNVKHFGGMGSALRLSEAGHTVACHDESFKHQDELEAFATTYPQLIPMSEQEPAELIEAVTSALGHVDVLVSNDIAPVEWRPIDKYAVEDYRDTVEALQIKPFALVNAVASQMKKRKSGHIIFITSAAPFGPWKELSTYSSARAGASALANALSKELGEYNIPVFAIAPNYLHSGDSPYYYPSEPWKTSPEHVAHVRKVTALQRLGTQKELGELVTFLASGSCDYLTGQVFWLAGGFPVIERWPGMPE

SEQ ID NO: 1022 - DNA, 768 bp, Artificial Sequence
  HHDH variant
  CDS (1)..(768)
atgagcaccgctattgtcaccaacgtcaaacattttggaggtatgggtagcgctctgcgtctgagcgaagctggtcataccgtcgcttgccatgatgaaagctttaagcatcaggatgaactagaagcttttgctgaaacctacccacagctgataccaatgagcgaacaggaaccagctgaactgattgaagctgtcaccagcgctcttggtcatgtcgatgtcctggtcagcaacgatatcgcgcctgtggaatggcggccaatcgataaatacgctgtcgaggattacagggatactgtcgaagctctgcagatcaagccatttgctctagtgaatgctgtcgcttcgcaaatgaagaagcgaaagtcggggcacatcatcttcatcacttcggctgccccgttcgggccatggaaggagctatcgacttactcttcggctcgagctggggctagtgcactagctaatgctctatcgaaggagctaggagagtacaatatcccggtgttcgctatcgctccgaattacctacactcgggggattcgccgtactattacccctctgagccgtggaagacttctccggagcacgcggctcacgtgcgtaaggtgactgctctacaacgactagggactcaaaaagagttgggggaattggtgacgtttttggcatctggctcttgtgattatttgactggccaggtgttttggttggcaggcggctttcccgtcatcgaacgttggcccggcatgcccgaataatga

SEQ ID NO: 1023 - protein, 254 aa, Artificial Sequence
  HHDH variant
MSTAIVTNVKHFGGMGSALRLSEAGHTVACHDESFKHQDELEAFAETYPQLIPMSEQEPAELIEAVTSALGHVDVLVSNDIAPVEWRPIDKYAVEDYRDTVEALQIKPFALVNAVASQMKKRKSGHIIFITSAAPFGPWKELSTYSSARAGASALANALSKELGEYNIPVFAIAPNYLHSGDSPYYYPSEPWKTSPEHAAHVRKVTALQRLGTQKELGELVTFLASGSCDYLTGQVFWLAGGFPVIERWPGMPE

SEQ ID NO: 1024 - DNA, 768 bp, Artificial Sequence
  HHDH variant
  CDS (1)..(768)
atgagcaccgctattgtcaccaacgtcaaacattttggaggtatgggtagcgctctgcgtctgagcgaagctggtcataccgtcgcttgccatgatgaaagctttaagcatcaggatgaactagaagcttttgctgaaacctacccacagctgataccaatgagcgaacaggaaccagctgaactgattgaagctgtcaccagcgctcttggtcatgtcgatgtcctggtcagcaacgatatcgcgcctgtggaatggcggccaatcgataaatacgctgtcgaggattacatagatactgtcgaagctctgcagatcaagccatttgctctagtgaatgctgtcgcttcgcaaatgaagaagcgaaagtcggggcacatcatcttcatcacttcggctgccccgttcgggccatggaaggagctatcgacttactcttcggctcgagctggggctagtgcactagctaatgctctatcgaaggagctaggagagtacaatatcccggtgttcgctatcgctccgaattacctacactcgggggattcgccgtactattacccctctgagccgtggaagacttctccggagcacgtggctcacgtgcgtaaggtgactgctctacaacgactagggactcaaaaagagttgggggaattggtgacgtttttggcatctggctcttgtgattatttgactggccaggtgttttggttggcaggcggctttcccgtcatcgaacgttggcccggcatgcccgaataatga

SEQ ID NO: 1025 - protein, 254 aa, Artificial Sequence
  HHDH variant
MSTAIVTNVKHFGGMGSALRLSEAGHTVACHDESFKHQDELEAFAETYPQLIPMSEQEPAELIEAVTSALGHVDVLVSNDIAPVEWRPIDKYAVEDYIDTVEALQIKPFALVNAVASQMKKRKSGHIIFITSAAPFGPWKELSTYSSARAGASALANALSKELGEYNIPVFAIAPNYLHSGDSPYYYPSEPWKTSPEHVAHVRKVTALQRLGTQKELGELVTFLASGSCDYLTGQVFWLAGGFPVIERWPGMPE

SEQ ID NO: 1026 - DNA, 768 bp, Artificial Sequence
  HHDH variant
  CDS (1)..(768)
atgagcaccgctattgtcaccaacgtcaaacattttggaggtatgggtagcgctctgcgtctgagcgaagctggtcataccgtcgcttgccatgatgaaagctttaagcatcaggatgaactagaagcttttgctgaaacctacccacagctgataccaatgagcgaacaggaaccagctgaactgattgaagctgtcaccggcgctcttggtcatgtcgatgtcctggtcagcaacgatatcgcgcctgtggaatggcggccaatcgataaatacgctgtcgaggaatacagggatactgtcgaagctctgcagatcaagccatttgctctagtgaatgctgtcgcttcgcaaatgaagaagcgaaagtcggggcacatcatcttcatcacttcggctgccccgttcgggccatggaaggagctatcgacttactcttcggctcgagctggggctagtgcactagctaatgctctatcgaaggagctaggagagtacaatatcccggtgttcgctatcgctccgaattacctacactcgggggattcgccgtactattacccctctgagccgtggaagacttctccggagcacgtggctcacgtgcgtaaggtgactgctctacaacgactagggactcaaaaagagttgggggaattggtgacgtttttggcatctggctcttgtgattatttgactggccaggtgttttggttggcaggcggctttcccgtcatcgaacgttggcccggcatgcccgaataatga

SEQ ID NO: 1027 - protein, 254 aa, Artificial Sequence
  HHDH variant
MSTAIVTNVKHFGGMGSALRLSEAGHTVACHDESFKHQDELEAFAETYPQLIPMSEQEPAELIEAVTGALGHVDVLVSNDIAPVEWRPIDKYAVEEYRDTVEALQIKPFALVNAVASQMKKRKSGHIIFITSAAPFGPWKELSTYSSARAGASALANALSKELGEYNIPVFAIAPNYLHSGDSPYYYPSEPWKTSPEHVAHVRKVTALQRLGTQKELGELVTFLASGSCDYLTGQVFWLAGGFPVIERWPGMPE

SEQ ID NO: 1028 - DNA, 768 bp, Artificial Sequence
  HHDH variant
  CDS (1)..(768)
atgagcaccgctattgtcaccaacgtcaaacattttggaggtatgggtagcgctctgcgtctgagcgaagctggtcataccgtcgcttgccatgatgaaagctttaagcatcaggatgaactagaagcttttgctgaaacctacccacagctgataccaatgagcgaacaggaaccagctgaactgattgaagctgtcaccagcgctcttggtcatgtcgatgtcctggtcagcaacgatatcgcgcctgtggaatggcggccaatcgataaatacgctgtcgaggattacagggatactgtcgaagctctgcagatcaagccatttgctctagtgaatgctgtcgcttcgcaaatgaagaagcgaaagtcggggcacatcatcttcatcacttcggctgccccgtttgggccatggaaggagctgtcgacttactcttcggctcgagctggggctagtgcactagctaatgctctatcgaaggagctaggagagtacaatatcccggtgttcgctatcgctccgaattacctacactcgggggattcgccgtactattacccctctgagccgtggaagacttctccggagcacgtggctcacgtgcgtaaggtgactgctctacaacgactagggactcaaaaagagttgggggaattggtgacgtttttggcatctggctcttgtgattatttgactggccaggtgttttggttggcaggcggctttcccgtcgtcgaacgttggcccggcatgcccgaataatga

SEQ ID NO: 1029 - protein, 254 aa, Artificial Sequence; identical to SEQ ID NO: 939
  HHDH variant

SEQ ID NO: 1030 - DNA, 768 bp, Artificial Sequence
  HHDH variant
  CDS (1)..(768)
atgagcaccgctattgtcaccaacgtcaaacattttggaggtatgggtagcgctctgcgtctgagcgaagctggtcataccgtcgcttgccatgatgaaagctttaagcatcaggatgaactagaagcttttgctgaaacctacccacagctgataccaatgagcgaacaggaaccagctgaactgattgaagctgtcaccagcgctcttggtcatgtcgatgtcctggtcagcaacgatatcgcgcctgtggaatggcggccaatcgataaatacgctgtcgaggattacagggatactgtcgaagctctgcagatcaagccatttgctctagtgaatgctgtcgcttcgcaaatgaaggagcgaaagtcggggcacatcatcttcatcacttcggctgccccgttcgggccatggaaggagctatcgacttactcttcggctcgagctggggctagtgcactagctaatgctctatcgaaggagctaggagagtacaatatcccggtgttcgctatcgctccgaattacctacactcgggggattcgccgtactattacccctctgagccgtggaagacttctccggagcacgtggctcacgtgcgtaaggtgactgctctacaacgactagggactcaaaaagagttgggggaattggtgacgtttttggcatctggctcttgtgattatttgactggccaggtgttttgcttggcaggcggctttcccgtcatcgaacgttggcccggcatgcccgaataatga

SEQ ID NO: 1031 - protein, 254 aa, Artificial Sequence
  HHDH variant
MSTAIVTNVKHFGGMGSALRLSEAGHTVACHDESFKHQDELEAFAETYPQLIPMSEQEPAELIEAVTSALGHVDVLVSNDIAPVEWRPIDKYAVEDYRDTVEALQIKPFALVNAVASQMKERKSGHIIFITSAAPFGPWKELSTYSSARAGASALANALSKELGEYNIPVFAIAPNYLHSGDSPYYYPSEPWKTSPEHVAHVRKVTALQRLGTQKELGELVTFLASGSCDYLTGQVFCLAGGFPVIERWPGMPE

SEQ ID NO: 1032 - DNA, 768 bp, Artificial Sequence
  HHDH variant
  CDS (1)..(768)
atgagcaccgctattgtcaccaacgtcaaacattttggaggtatgggtagcgctctgcgtctgagcgaagctggtcataccgtcgcttgccatgatgaaagctttaagcatcaggatgaactagaagcttttgctgaaacctacccacagctgataccaatgagcgaacaggaaccagctgaactgattgaagctgtcaccagcgctcttggtcatgtcgatgtcctggtcagcaacgatatcgcgcctgtggaatggcggccaatcgataaatacgctgtcgaggattacagggatactgtcgaagctctgcagatcaagccatttgctctagtgaatgctgtcgcttcgcaaatgaagaagcgaaagtcggggcacatcatcttcatcacttcggctgccccgttcgggccatggaaggagctatcgacttactcttcggctcgagctggggctagtgcactagctaatgctctatcgaaggagctaggagagtacaatatcccggtgttcgctatcgctccgaattacctacactcgggggattcgccgtactattacccctctgagccgtggaagacttctccggagcacgtggctcacgtgcgtaagggaactgctctacaacgactagggactcaaaaagagttgggggaattggtgacgtttttggcatctggctcttgtgattatttgactggccaggtgttttggttggcaggcggctttcccgtcatcgaacgttggcccggcatgcccgaataatga

SEQ ID NO: 1033 - protein, 254 aa, Artificial Sequence
  HHDH variant
MSTAIVTNVKHFGGMGSALRLSEAGHTVACHDESFKHQDELEAFAETYPQLIPMSEQEPAELIEAVTSALGHVDVLVSNDIAPVEWRPIDKYAVEDYRDTVEALQIKPFALVNAVASQMKKRKSGHIIFITSAAPFGPWKELSTYSSARAGASALANALSKELGEYNIPVFAIAPNYLHSGDSPYYYPSEPWKTSPEHVAHVRKGTALQRLGTQKELGELVTFLASGSCDYLTGQVFWLAGGFPVIERWPGMPE

SEQ ID NO: 1034 - DNA, 768 bp, Artificial Sequence
  HHDH variant
  CDS (1)..(768)
atgagcaccgctattgtcaccaacgtcaaacattttggaggtatgggtagcgctctgcgtctgagcgaagctggtcataccgtcgcttgccatgatgaaagctttaagcatcaggatgaactagaagcttttgctgaaacctacccacagctgataccaatgagcgaacaggaaccggctgaactgattgaagctgtcaccagcgctcttggtcatgtcgatgtcctggtcagcaacgatatcgcgcctgtggaatggcggccaatcgataaatacgctgtcgaggattacagggattgtgtcgaagctctgcagatcaagccatttgctctagtgaatgctgtcgcttcgcaaatgaagaagcgaaagtcggggcacatcatcttcatcacttcggctgccccgttcgggccatggaaggagctatcgacttactcttcggctcgagctggggctagtgcactagctaatgctctatcgaaggagctaggggagtacaatatcccggtgttcgctatcgctccgaattacctacactcgggggattcgccgtactattacccctctgagccgtggaagacttctccggagcacgtggctcacgtgcgtaaggtgactgctctacaacgactagggactcaaaaagagttgggggaattggtgacgtttttggcatctggctcttgtgattatttgactggccaggtgttttggttggcaggcggctttcccgtcatcgaacgttggcccggcatgcccgaataatga

SEQ ID NO: 1035 - protein, 254 aa, Artificial Sequence
  HHDH variant
MSTAIVTNVKHFGGMGSALRLSEAGHTVACHDESFKHQDELEAFAETYPQLIPMSEQEPAELIEAVTSALGHVDVLVSNDIAPVEWRPIDKYAVEDYRDCVEALQIKPFALVNAVASQMKKRKSGHIIFITSAAPFGPWKELSTYSSARAGASALANALSKELGEYNIPVFAIAPNYLHSGDSPYYYPSEPWKTSPEHVAHVRKVTALQRLGTQKELGELVTFLASGSCDYLTGQVFWLAGGFPVIERWPGMPE

SEQ ID NO: 1036 - DNA, 768 bp, Artificial Sequence
  HHDH variant
  CDS (1)..(768)
atgagcaccgctattgtcaccaacgtcaaacattttggaggtatgggtagcgctctgcgtctgagcgaagctggtcataccgtcgcttgccatgatgaaagctttaagcatcaggatgaactagaagcttttgctgaaacctacccacagctgataccaatgagcgaacaggaaccagctgaactgattgaagctgtcaccagcgctcttggtcatgtcgatgtcctggtcagcaacgatatcgcgcctgtggaatggcggccaatcgataaatacgctgtcgaggattacagggatactgtcgaagctctgcagatcaagccatttgctctagtgaatgctgtcgcttcgcaaatgaaggagcgaaagtcggggcacatcatcttcatcacttcggctgccccgttcgggccatggaaggagctatcgacttactcttcggctcgagctggggctagtgcactagctaacgctctatcgaaggagctaggagagtacaatatcccggtgttcgctatcgctccgaattacctacactcgggggattcgccgtactattacccctctgagccgtggaagacttctccggagcacgtggctcacgtgcgtaaggtgactgctctacaacgactagggactcaaaaagagttgggggaattggtgacgtttttggcatctggctcttgtgattatttgactggccaggtgttttggttggcaggcggctttcccgtcatcgaacgttggcccggcatgcccgaataatga

SEQ ID NO: 1037 - protein, 254 aa, Artificial Sequence
  HHDH variant
MSTAIVTNVKHFGGMGSALRLSEAGHTVACHDESFKHQDELEAFAETYPQLIPMSEQEPAELIEAVTSALGHVDVLVSNDIAPVEWRPIDKYAVEDYRDTVEALQIKPFALVNAVASQMKERKSGHIIFITSAAPFGPWKELSTYSSARAGASALANALSKELGEYNIPVFAIAPNYLHSGDSPYYYPSEPWKTSPEHVAHVRKVTALQRLGTQKELGELVTFLASGSCDYLTGQVFWLAGGFPVIERWPGMPE

SEQ ID NO: 1038 - DNA, 768 bp, Artificial Sequence
  HHDH variant
  CDS (1)..(768)
atgagcaccgctattgtcaccaacgtcaaacattttggaggtatgggtagcgctctgcgtctgagcgaagctggtcacaccgtcgcttgccatgatgaaagctttaagcatcaggatgaactagaagcttttgctgaaacctacccacagctgcatccaatgagcgaacaggaaccagctgaactgattgaagctgtcaccagcgctcttggtcatgtcgatgtcctggtcagcaacgatatcgcgcctgtggaatggcggccaatcgataaatacgctgtcgaggattacagggatactgtcgaagctctgcagatcaagccatttgctctagtgaatgctgtcgcttcgcaaatgaagaagcgaaagtcggggcacatcatcttcatcacttcggctgccccgttcgggccatggaaggagctatcgacttactcttcggctcgagctggggctagtgcactagctaatgctctatcgaaggagctaggagagtacaatatcccggtgttcgctatcgctccgaattacctacactcgggggattcgccgtactattacccctctgagccgtggaagacttctccggagcacgtggctcacgtgcgtaaggtgactgctctacaacgactagggactcaaaaagagttgggggaattggtgacgtttttggcatctggctcttgtgattatttgactggccaggtgttttggttggcaggcggctttcccgtcatcgaacgttggcccggcatgcccgaataatga

SEQ ID NO: 1039 - protein, 254 aa, Artificial Sequence
  HHDH variant
MSTAIVTNVKHFGGMGSALRLSEAGHTVACHDESFKHQDELEAFAETYPQLHPMSEQEPAELIEAVTSALGHVDVLVSNDIAPVEWRPIDKYAVEDYRDTVEALQIKPFALVNAVASQMKKRKSGHIIFITSAAPFGPWKELSTYSSARAGASALANALSKELGEYNIPVFAIAPNYLHSGDSPYYYPSEPWKTSPEHVAHVRKVTALQRLGTQKELGELVTFLASGSCDYLTGQVFWLAGGFPVIERWPGMPE

SEQ ID NO: 1040 - DNA, 768 bp, Artificial Sequence
  HHDH variant
  CDS (1)..(768)
atgagcaccgctattgtcaccaacgtcaaacattttggaggtatgggtagcgctctgcgtctgagcgaagctggtcataccgtcgcttgccatgatgaaagctttaagcatcaggatgaactagaagcttttgctgaaacctacccacagctgataccaatgagcgaacaggaaccagctgaactgattgaagctgtcaccagcgctcttggtcatgtcgatgtcctggtcagcaacgatatcgcgcctgtggaatggcggccaatcgataaatacgctgtcgaggattacagggatactgtcgaagctctgcagatcaagccatttgctctagtgaatgctgtcgcttcgcaaatgaagaagcgaaagtcggggcacatcatcttcatcacttcggctgccccgttcgggccatggaaggagctatcgacttactcttcggctcgagctggggctagtgcactagctaatgctctatcgaaggagctaggagagtacaatatcccggtgttcgctatcgctccgaattacctacactcgggggattcgccgtactattacccctctgagccgtggaagacttctccggagcacgtggctcacgtgcgtaaggtgactgctctacaacgactagggactcaaaaagagttgggggaattggtgacgtttttggcatctggctcttgtgattatttaactggccaggtgtttcggttggcaggcggctttcccgtcatcgaacgttggcccggcatgcccgaataatga

SEQ ID NO: 1041 - protein, 254 aa, Artificial Sequence
  HHDH variant
MSTAIVTNVKHFGGMGSALRLSEAGHTVACHDESFKHQDELEAFAETYPQLIPMSEQEPAELIEAVTSALGHVDVLVSNDIAPVEWRPIDKYAVEDYRDTVEALQIKPFALVNAVASQMKKRKSGHIIFITSAAPFGPWKELSTYSSARAGASALANALSKELGEYNIPVFAIAPNYLHSGDSPYYYPSEPWKTSPEHVAHVRKVTALQRLGTQKELGELVTFLASGSCDYLTGQVFRLAGGFPVIERWPGMPE

SEQ ID NO: 1042 - DNA, 768 bp, Artificial Sequence
  HHDH variant
  CDS (1)..(768)
atgagcaccgctattgtcaccaacgtcaaacattttggaggtatgggtagcgctctgcgtctgagcgaagctggtcataccgtcgcttgccatgatgaaagctttaagcatcaggatgaactagaagcttttgctgaaacctacccacagctgataccaatgagcgaacaggagccagctgaactgattgaagctgtcaccagcgctcttggtcatgtcgatgtcctggtcagcaacgatatcgcgcctgtggaatggcggccaatcgataaatacgctgtcgaggattacagggatactgtcgaagctctgcagatcaagccatttgctctagtgaatgctgtcgctccgcaaatgaagaagcgaaagtcggggcacatcatcttcatcacttcggctgccccattcgggccatggaaagagctttcgacttactcttcggctcgagcaggggctagtgcactggcaaatgctctgtcgaaggagctgggtgagtacaatatcccggtgttcgctatcgctccgaattacctacactcgggggattcgccgtactattacccctctgagccgtggaagacttctccggagcacgtggctcacgtgcgtaaggtgactgctctacaacgactagggactcaaaaagagttgggggaattggtgacgtttttggcatctggctcttgtgattatttgactggccaggtgttttggttggcaggcggctttcccgtcatcgaacgttggcccggcatgcccgaataatga

SEQ ID NO: 1043 - protein, 254 aa, Artificial Sequence
  HHDH variant
MSTAIVTNVKHFGGMGSALRLSEAGHTVACHDESFKHQDELEAFAETYPQLIPMSEQEPAELIEAVTSALGHVDVLVSNDIAPVEWRPIDKYAVEDYRDTVEALQIKPFALVNAVAPQMKKRKSGHIIFITSAAPFGPWKELSTYSSARAGASALANALSKELGEYNIPVFAIAPNYLHSGDSPYYYPSEPWKTSPEHVAHVRKVTALQRLGTQKELGELVTFLASGSCDYLTGQVFWLAGGFPVIERWPGMPE

SEQ ID NO: 1044 - DNA, 768 bp, Artificial Sequence
  HHDH variant
  CDS (1)..(768)
atgagcaccgctattgtcaccaacgtcaaacattttggaggtatgggtagcgctctgcgtctgagcgaagctggtcataccgtcgcttgccatgatgaaagctttaagcatcaggatgaactagaagcttttgctgaaacctacccacagctgataccaatgagcgaacaggaaccagctgaactgattgaagctgtcaccagcgctcttggtcatgtcgatgtcctggtcagcaacgatatcgcgcctgtggaatggcggccaatcgataaatacgctgtcgaggattacagggatactgtcgaagctctgcagatcaagccatttgctctagtgaatgctgtcgcttcgcaaatgaagaagcgaaagtcggggcacatcatcttcatcacttcggctgccccgttcgggccatggaaggagctatcgacttactcttcggctcgagctggggctagtgcactagctaatgctctatcgaaggagctaggagagtacaatatcccggtgttcgctatcgctccgaattacctacacacgggggattcgccgtactattacccctctgagccgtggaagacttctccggagcacgtggctcacgtgcgtaaggtgactgctctacaacgactagggacccaaaaagagttgggggaattggtgacgtttttggcatctggctcttgtgattatttgactggccaggtgttttggttggcaggcggctttcccgtcatcgaacgttggcccggcatgcccgaataatga

SEQ ID NO: 1045 - protein, 254 aa, Artificial Sequence; identical to SEQ ID NO: 923
  HHDH variant

SEQ ID NO: 1046 - DNA, 768 bp, Artificial Sequence
  HHDH variant
  CDS (1)..(768)
atgagcaccgctattgtcaccaacgtttcacattttggaggtatgggtagcgctctgcgtctgagcgaagctggtcataccgtcgcttgccatgatgaaagctttaagcatcaggatgaactagaagcttttgctgaaacctacccacagctgataccaatgagcgaacaggaaccagctgaactgattgaagctgtcaccagcgctcttggtcatgtcgatgtcctggtcagcaacgatatcgcgcctgtggaatggcggccaatcgataaatacgctgtcgagaagtacagggatactgtcgaagctctgcagatcaagccatttgctctagtgaatgctgtcgcttcgcaaatgaagaagcgaaagtcggggcacatcatcttcatcacttcggctgccccgttcgggccatggaaggagctatcgacttactcttcggctcgagctggggctagtgcactagctaatgctctatcgaaggagctaggagagtacaatatcccggtgttcgctatcgctccgaattacctacactcgggggattcgccgtactattacccctctgagccgtggaagacttctccggagcacgtggctcacgtgcgtaaggtgactgctctacaacgactagggactcaaaaagagttgggggaattggtgacgtttttggcatctggctcttgtgattatttgactggccaggtgttttggttggcaggcggctttcccgtcatcgaacgttggcccggcatgcccgaataatga

SEQ ID NO: 1047 - protein, 254 aa, Artificial Sequence
  HHDH variant
MSTAIVTNVSHFGGMGSALRLSEAGHTVACHDESFKHQDELEAFAETYPQLIPMSEQEPAELIEAVTSALGHVDVLVSNDIAPVEWRPIDKYAVEKYRDTVEALQIKPFALVNAVASQMKKRKSGHIIFITSAAPFGPWKELSTYSSARAGASALANALSKELGEYNIPVFAIAPNYLHSGDSPYYYPSEPWKTSPEHVAHVRKVTALQRLGTQKELGELVTFLASGSCDYLTGQVFWLAGGFPVIERWPGMPE

SEQ ID NO: 1048 - DNA, 768 bp, Artificial Sequence
  HHDH variant
  CDS (1)..(768)
atgagcaccgctattgtcaccaacgtcaaacattttggaggtatgggtagcgctctgcgtctgagcgaagctggtcataccgtcgcttgccatgatgaaagctttaagcatcaggatgaactagaagcttttgctgaaacctacccacagctgataccaatgagcgaacaggaaccagctgaactgattgaagctgtcaccagcgctcttggtcatgtcgatgtcctggtcagcaacgatatcgcgcctgtggaatggcggccaatcgataaatacgctatcgaggattacagggatactgtcgaagctctgcagatcaagccatttgctctagtgaatgctgtcgcttcgcaaatgaagaagcgaaagtcggggcacatcatcttcatcacttcggctgccccgttcgggccatggaaggagctatcgacttactcttcggctcgagctggggctagtgcactagctaatgctctatcgaaggagctaggagagtacaatatcccggtgttcgctatcgctccgaattacctacactcgggggattcgccgtactattacccctctgagccgtggaagacttctccggagcacgtggctcacgtgcgtaaggtgactgctctacaacgactagggactcaaaaagagttgggggaattggtgacgtttttggcatctggctcttgtgattatttgactggccaggtgttttggttggcaggcggctttcccgtcatcgaacgttggcccggcatgcccgaataatga

SEQ ID NO: 1049 - protein, 254 aa, Artificial Sequence; identical to SEQ ID NO: 931
  HHDH variant

SEQ ID NO: 1050 - DNA, 768 bp, Artificial Sequence
  HHDH variant
  CDS (1)..(768)
atgagcaccgctattgtcaccaacgtcaaacattttggaggtatgggtagcgctctgcgtctgagcgaagctggtcataccgtcgcttgccatgatgaaagctttaagcatcaggatgaactagaagcttttgctgaaacctacccacagctgataccaatgagcgaacaggaaccagctgaactgattgaagctgtcaccagcgctcttggtcatgtcgatgtcctggtcagcaacgatatcgcgcctgtggaatggcggccaatcgataaatacgctgtcgaggattacagggatactgtcgaagctctgcagatcaagccatttgctctagtgaatgctgtcgcttcgcaaatgaagaagcgaaagtcggggcacatcatcttcatcacttcggctgccccgttcgggccatggaaggagctatcgacttactcttcggctcgagctggggctagtgcactagctaatgctctatcgaaggagctaggagagtacaatatcccggtgttcgctatcgctccgaattacctacacacgggggattcgccgtactattacccctctgagccgtggaagacttctccggagcacgtggctcacgtgcgcaaggtgactgctctacaacgactagggactcaaaaagagttgggggaattggtgacgtttttggcatctggctcttgtgattatttgactggccaggtgttttggttggcaggcggctttcccgtcatcgaacgttggcccggcatgcccgaataatga

SEQ ID NO: 1051 - protein, 254 aa, Artificial Sequence; identical to SEQ ID NO: 923
  HHDH variant

SEQ ID NO: 1052 - DNA, 768 bp, Artificial Sequence
  HHDH variant
  CDS (1)..(768)
atgagcaccgctattgtcaccaacgtcaaacattttggaggtatgggtagcgctctgcgtctgagcgaagctggtcataccgtcgcttgccatgatgaaagctttaagcatcaggatgaactagaagcttttgctgaaacctacccacagctgataccaataagcgaacaggaaccagctgaactgattgaagctgtcaccagcgctcttggtcatgtcgatgtcctggtcagcaacgatatcgcgcctgtggaatggcggccaatcgataaatacgctgtcgaggattacagggatactgtcgaagctctgcagatcaagccatttgctctagtgaatgctgtcgcttcgcaaatgaagcggcgaaagtcggggcacatcatcttcatcacttcggctgccccgttcgggccatggaaggagctttcgacttactcttcggctcgagcaggggctagtgcactggcaaatgctctgtcgaaggagctcggtgagtacaatattccggtgttcgctatcgctccgaattacctacactcgggggattcgccgtactattacccctctgagccgtggaagacttctccggagcacgtggctcacgtgcgtaaggtgactgctctacaacgactagggactcaaaaagagttgggggaattggtgacgtttttggcatctggctcttgtgattatttgactggccaggtgttttggttggcaggcggctttcccgtcatcgaacgttggcccggcatgcccgaataatga

SEQ ID NO: 1053 - protein, 254 aa, Artificial Sequence
  HHDH variant
MSTAIVTNVKHFGGMGSALRLSEAGHTVACHDESFKHQDELEAFAETYPQLIPISEQEPAELIEAVTSALGHVDVLVSNDIAPVEWRPIDKYAVEDYRDTVEALQIKPFALVNAVASQMKRRKSGHIIFITSAAPFGPWKELSTYSSARAGASALANALSKELGEYNIPVFAIAPNYLHSGDSPYYYPSEPWKTSPEHVAHVRKVTALQRLGTQKELGELVTFLASGSCDYLTGQVFWLAGGFPVIERWPGMPE

SEQ ID NO: 1054 - DNA, 768 bp, Artificial Sequence
  HHDH variant
  CDS (1)..(768)
atgagcaccgctattgtcaccaacgtcaaacattttggaggtatgggtagcgctctgcgtctgagcgaagctggtcataccgtcgcttgccatgatgaaagctttaagcatcaggatgaactagaagcttttgctgaaacctacccacagctgataccaatgagcgaacaggaaccagctgaactgattgaagctgtcaccagcgctcttggtcatgtcgatgtcctggtcagcaacgatatcgcgcctgtggaatggcggccaatcgataaatacgctgtcgaggattacagggatactgtcgaagctctgcagatcaagccatttgctctagtgaatgctgtcgcttcgcaaatgaagaagcgaaagtcggggcacatcatcttcatcacttcggctgccccgttcgggccatggaaggagctatcgacttactcttcggctcgagctggggctagtgcactagctaatgctctatcgaaggagctaggagagtacaatatcccggtgttcgctatcgctccgaattacctacactcgggggattcgccgtactattacccctctgagccgtggaagacttctccggagcacgtagctcacgtgcgtaagtacactgctctacaacgactagggactcaaaaagagttgggggaactggtgacgtttttggcatctggctcttgtgattatttgactggccaggtgttttggttggcaggcggctttcccgtcatcgaacgttggcccggcatgcccgaataatga

SEQ ID NO: 1055 - protein, 254 aa, Artificial Sequence
  HHDH variant
MSTAIVTNVKHFGGMGSALRLSEAGHTVACHDESFKHQDELEAFAETYPQLIPMSEQEPAELIEAVTSALGHVDVLVSNDIAPVEWRPIDKYAVEDYRDTVEALQIKPFALVNAVASQMKKRKSGHIIFITSAAPFGPWKELSTYSSARAGASALANALSKELGEYNIPVFAIAPNYLHSGDSPYYYPSEPWKTSPEHVAHVRKYTALQRLGTQKELGELVTFLASGSCDYLTGQVFWLAGGFPVIERWPGMPE

SEQ ID NO: 1056 - DNA, 768 bp, Artificial Sequence
  HHDH variant
  CDS (1)..(768)
atgagcaccgctattgtcaccaacgtcaaacattttggaggtatgggtagcgctctgcgtctgagcgaagctggtcataccgtcgcttgccatgatgaaagctttaagcatctggatgaactagaagcttttgctgaaacctacccacagctgataccaatgagcgaacaggaaccagctgaactgattgaagctgtcaccagcgctcttggtcatgtcgatgtcctggtcaacaacgatatcgcgcctgtggaatggcggccaatcgataaatacgctgtcgaggattacagggatactgtcgaagctctgcagatcaagccatttgctctagtgaatgctgtcgcttcgcaaatgaagaagcgaaagtcggggcacatcatcttcatcacttcggctgccccgttcgggccatggaaggagctatcgacttactcttcggctcgagctggggctagtgcactagctaatgctctatcgaaggagctaggagagtacaatatcccggtgttcgctatcgctccgaattacctacactcgggggattcgccgtactattacccctctgagccgtggaagacttctccggagcacgtggctcacgtgcgtaaggtgactgctctacaacgactagggactcaaaaagagttgggggaattggtgacgtttttggcatctggctcttgtgattatttgactggccaggtgtttcggttggcaggcggctttcccgtcatcgaacgttggcccggcatgcccgaataatga

SEQ ID NO: 1057 - protein, 254 aa, Artificial Sequence
  HHDH variant
MSTAIVTNVKHFGGMGSALRLSEAGHTVACHDESFKHLDELEAFAETYPQLIPMSEQEPAELIEAVTSALGHVDVLVNNDIAPVEWRPIDKYAVEDYRDTVEALQIKPFALVNAVASQMKKRKSGHIIFITSAAPFGPWKELSTYSSARAGASALANALSKELGEYNIPVFAIAPNYLHSGDSPYYYPSEPWKTSPEHVAHVRKVTALQRLGTQKELGELVTFLASGSCDYLTGQVFRLAGGFPVIERWPGMPE

SEQ ID NO: 1058 - DNA, 768 bp, Artificial Sequence
  HHDH variant
  CDS (1)..(768)
atgagcaccgctattgtcaccaacgtcaaacattttggaggtatgggtagcgctctgcgtctgagcgaagctggtcataccgtcgcttgccatgatgaaagctttaagcatcaggatgaactagaagcttttgctgaaacctacccacagctgataccaatgagcgaacaggaaccagctgaactgattgaagctgtcaccagcgctcttggtcatgtcgatgtcctggtcagcaacgatatcgcgcctgtggaatggcggccaatcgataaatacgctgtcgaggattacagggatactgtcgaagctctgcagatcaagccatttgctctagtgaatgctgtcgcttcgcaaatgaagaagcgaaagtcggggcacatcatcttcatcacttcggctgccccgttcgggccatggaaggagctatcgacttactcttcggctcgagctggggctaatgcactagctaatgctctatcgaaggagctaggagagtacaatatcccggtgttcgctatcgctccgaattacctacactccggggattcgccgtactattacccctctgagccgtggaagacttctccggagcacgtggctcacgtgcgtaaggtgactgctctacaacgactagggactcaaaaagagttgggggaattggtgacgtttttggcatctggctcttgtgattatttgactggccaggtgttttggttggcaggcggctttcccgtcatcgaacgttggcccggcatgcccgaataatga

SEQ ID NO: 1059 - protein, 254 aa, Artificial Sequence
  HHDH variant
MSTAIVTNVKHFGGMGSALRLSEAGHTVACHDESFKHQDELEAFAETYPQLIPMSEQEPAELIEAVTSALGHVDVLVSNDIAPVEWRPIDKYAVEDYRDTVEALQIKPFALVNAVASQMKKRKSGHIIFITSAAPFGPWKELSTYSSARAGANALANALSKELGEYNIPVFAIAPNYLHSGDSPYYYPSEPWKTSPEHVAHVRKVTALQRLGTQKELGELVTFLASGSCDYLTGQVFWLAGGFPVIERWPGMPE

SEQ ID NO: 1060 - DNA, 768 bp, Artificial Sequence
  HHDH variant
  CDS (1)..(768)
atgagcaccgctattgtcaccaacgtcaaacattttggaggtatgggtagcgctctgcgtctgagcgaagctggtcataccgtcgcttgccatgatgaaagctttaagcatcaggatgaactagaagcttttgctgaaacctacccacagctgataccaatgagcgaacaggaaccagctgaactgattgaagctgtcaccagcgctcttggtcatgtcgatgtcctggtcagcaacgatatcgcgcctgtggaatggcggccaatcgataaatacgctgtcgaggattacagggatactgtcgaagctctgcagatcaagccatttgctctagcgaatgctgtcgcttcgcaaatgaagaagcgaaagtcggggcacatcatcttcatcacttcggctgccccgttcgggccagacaaggagatctcgacttactcttcggctcgagctggggctagtgcactagctaatgctctatcgaaggagctaggagagtacaatatcccggtgttcgctatcgctccgcggtacctacactcgggggattcgccgtactattacccctctgagccgtggaagacttctccggagcacgtggctcacgtgcgtaaggtgactgctctacaacgactagggactcagaaagagttgggggaattggtgacgtttttggcatctggctcttgtgattatttgactggccaggtgttttgtttggcaggcggctttcccgtcatcgaacgttggcccggcatgcccgaataatga

SEQ ID NO: 1061 - protein, 254 aa, Artificial Sequence
  HHDH variant
MSTAIVTNVKHFGGMGSALRLSEAGHTVACHDESFKHQDELEAFAETYPQLIPMSEQEPAELIEAVTSALGHVDVLVSNDIAPVEWRPIDKYAVEDYRDTVEALQIKPFALANAVASQMKKRKSGHIIFITSAAPFGPDKEISTYSSARAGASALANALSKELGEYNIPVFAIAPRYLHSGDSPYYYPSEPWKTSPEHVAHVRKVTALQRLGTQKELGELVTFLASGSCDYLTGQVFCLAGGFPVIERWPGMPE

SEQ ID NO: 1062 - DNA, 768 bp, Artificial Sequence
  HHDH variant
  CDS (1)..(768)
atgagcaccgctattgtcaccaacgtcaaacattttggaggtatgggtagcgctctgcgtctgagcgaagctggtcataccgtcgcttgccatgatgaaagctttaagcatcaggatgaactagaagcttttgctgaaacctacccacagctgataccaatgagcgaacaggaaccagctgaactgattgaagctgtcaccagcgctcttggtcatgtcgatgtcctggtcagcaacgatatcgcgcctgtggaatggcggccaatcgataaatacgctgtcgaggattacagggatactgtcgaagctctgcagatcaagccatttgctctagtgaatgctgtcgcttcgcaaatgaagaagcgaaagtcggggcacatcatcttcatcacttcggctgccccgttcgggccatggaaggagctatcgacttactcttcggctcgagctggggctagtgcactagctaatgctctatcgaaggagctaggagagtacaatatcccggtgttcgctatcgctccgaattacctacactcgggggattcgccgtactattacccctctgagccgtggaagacttctccggagcacgtggctcacgtgcgtaaggcgactgctctacaacgactagggactcaaaaagagttgggggagttggtgacgtttttggcatctggctcttgtgattatttgactggccaggtgttttggttggcaggcggctttcccgtcatcgaacgttggcccggcatgcccgaataatga

SEQ ID NO: 1063 - protein, 254 aa, Artificial Sequence
  HHDH variant
MSTAIVTNVKHFGGMGSALRLSEAGHTVACHDESFKHQDELEAFAETYPQLIPMSEQEPAELIEAVTSALGHVDVLVSNDIAPVEWRPIDKYAVEDYRDTVEALQIKPFALVNAVASQMKKRKSGHIIFITSAAPFGPWKELSTYSSARAGASALANALSKELGEYNIPVFAIAPNYLHSGDSPYYYPSEPWKTSPEHVAHVRKATALQRLGTQKELGELVTFLASGSCDYLTGQVFWLAGGFPVIERWPGMPE

SEQ ID NO: 1064 - DNA, 768 bp, Artificial Sequence
  HHDH variant
  CDS (1)..(768)
atgagcaccgctattgtcaccaacgtcaaacattttggaggtatgggtagcgctctgcgtctgagcgaagctggtcataccgtcgcttgccatgatgaaagctttaagcatcaggatgaactagaagcttttgctgaaacctacccacagctgataccaatgagcgaacaggaaccagctgaactgattgaagctgtcaccagcgctcttggtcatgtcgatgtcctggtcagcaacgatatcgcgcctgtggaatggcggccaatcgataaatacgctgtcgaggattacagggatactgtcgaagctctgcagatcaagccatttgctctagtgaatgctgtcgcttcgcaaatgaagaagcgaaagtcggggcacatcatcttcatcacttcggctgccccgttcgggccatggaaggagctatcgacttactcttcggctcgagctggggctagtgcactagctaatgctctatcgaaggagctaggagagtacaatatcccggtgttcgctatcgctccgaattacctacactcgggggattcgccgtactattacccctctgagccgtggaagacttctccggagcacgtggctcacgtgcgtaagacgactgctctacaacgactagggactcaaaaagagttgggggaattggtgacgtttttggcatctggctcttgtgattatttgactggccaggtgttttggttggcaggcggctttcccgtcatcgaacgttggcccggcatgcccgaataatga

SEQ ID NO: 1065 - protein, 254 aa, Artificial Sequence; identical to SEQ ID NO: 880
  HHDH variant

SEQ ID NO: 1066 - DNA, 768 bp, Artificial Sequence
  HHDH variant
  CDS (1)..(768)
atgagcaccgctattgtcaccaacgtcaaacattttggaggtatgggtagcgctctgcgtctgagcgaagctggtcataccgtcgcttgccatgatgaaagctttaagcatcaggatgaactagaagcttttgctgaaacctacccacagctgataccaatgagcgaacaggaaccagctgaactgattgaagctgtcaccagcgctcttggtcatgtcgatgtcctggtcagcaacgatatcgcgcctgtggaatggcggccaatcgataaatacgctgtcgaggattacagggatatggtcgaagctctgcagatcaagccatttgctctagtgaatgctgtcgcttcgcaaatgaagaagcgaaagtcggggcacatcatcttcatcacttcggctgccccgttcgggccatggaaggagctatcgacttactcttcggctcgagctggggctagtgcactagctaatgctctatcgaaggagctaggagagtacaatatcccggtgttcgctatcgctccgaattacctacactcgggggattcgccgtactattacccctctgagccgtggaagacttctccggagcacgtggctcacgtgcgtaaggtgactgctctacaacgactagggactcaaaaagagttgggggaattggtgacgtttttggcatctggctcttgtgattatttgactggccaagtgttttggttggcaggcggctttcccgtcatcgaacgttggcccggcatgcccgaataatga

SEQ ID NO: 1067 - protein, 254 aa, Artificial Sequence
  HHDH variant
MSTAIVTNVKHFGGMGSALRLSEAGHTVACHDESFKHQDELEAFAETYPQLIPMSEQEPAELIEAVTSALGHVDVLVSNDIAPVEWRPIDKYAVEDYRDMVEALQIKPFALVNAVASQMKKRKSGHIIFITSAAPFGPWKELSTYSSARAGASALANALSKELGEYNIPVFAIAPNYLHSGDSPYYYPSEPWKTSPEHVAHVRKVTALQRLGTQKELGELVTFLASGSCDYLTGQVFWLAGGFPVIERWPGMPE

SEQ ID NO: 1068 - DNA, 768 bp, Artificial Sequence
  HHDH variant
  CDS (1)..(768)
atgagcaccgctattgtcaccaacgtcaaacattttggaggtatgggtagcgctctgcgtctgagcgaagctggtcataccgtcgcttgccatgatgaaagctttaagcatcaggatgaactagaagcttttgctgaaacctacccacagctgataccaatgagcgaacaggaaccagctgaactgattgaagctgtcaccagcgctcttggtcatgtcgatgtcctggtcagcaacgatatcgcgcctgtggaatggtccccaatcgataaatacgctgtcgaggattacagggatactgtcgaagctctgcagatcaagccatttgctctagtgaatgctgtcgcttcgcaaatgaagaagcgaaagtcggggcacatcatcttcatcacttcggctgccccgttcgggccatggaaggagctatcgacttactcttcggctcgagctggggctagtgcactagctaatgctctatcgaaggagctaggagagtacaatatcccggtgttcgctatcgctccgaattacctacactcgggggattcgccgtactattacccctctgagccgtggaagacttctcccgagcacgtggctcacgtgcgtaaggtgactgctctacaacgactagggactcaaaaagagttgggggaattggtgacgtttttggcatctggctcttgtgattatttgactggccaggtgttttggttggcaggcggctttcccgtcatcgaacgttggcccggcatgcccgaataatga

SEQ ID NO: 1069 - protein, 254 aa, Artificial Sequence; identical to SEQ ID NO: 876
  HHDH variant

SEQ ID NO: 1070 - DNA, 768 bp, Artificial Sequence; identical to SEQ ID NO: 922
  HHDH variant
  CDS (1)..(768)

SEQ ID NO: 1071 - protein, 254 aa, Artificial Sequence; identical to SEQ ID NO: 923
  HHDH variant

SEQ ID NO: 1072 - DNA, 768 bp, Artificial Sequence
  HHDH variant
  CDS (1)..(768)
atgagcaccgctattgtcaccaacgtcaaacattttggagggatgggtagcgctctgcgtctgagcgaagctggtcataccgtcgcttgccatgatgaaagctttaagcatcaggatgaactagaagcttttgctgaaacctacccacagctgataccaatgagcgaacaggaaccagctgaactgattgaagctgtcaccagcgctcttggtcatgtcgatgtcctggtcagcaacgatatcgcgcctgtggaatggcggccaatcgataaatacgctgtcgaggattacagggatactgtcgaagctctgcagatcaagccatttgctctagtgaatgctgtcgcttcgcaaatgaagaagcgaatgtcggggcacatcatcttcatcacttcggctgccccgttcgggccatggaaggagctatcgacttactcttcggctcgagctggggctagtgcactagctaatgctctatcgaaggagctaggagagtacaatatcccggtgttcgctatcgctccgaattacctacactcgggggattcgccgtactattacccctctgagccgtggaagacttctccggagcacgtggctcacgtgcgtaaggtgactgctctacaacgactagggactcaaaaagagttgggggaattggtgacgtttttggcatctggctcttgtgattatttgactggccaggtgttttggttggcaggcggctttcccgtcatcgaacgttggcccggcatgcccgaataatga

SEQ ID NO: 1073 - protein, 254 aa, Artificial Sequence
  HHDH variant
MSTAIVTNVKHFGGMGSALRLSEAGHTVACHDESFKHQDELEAFAETYPQLIPMSEQEPAELIEAVTSALGHVDVLVSNDIAPVEWRPIDKYAVEDYRDTVEALQIKPFALVNAVASQMKKRMSGHIIFITSAAPFGPWKELSTYSSARAGASALANALSKELGEYNIPVFAIAPNYLHSGDSPYYYPSEPWKTSPEHVAHVRKVTALQRLGTQKELGELVTFLASGSCDYLTGQVFWLAGGFPVIERWPGMPE

SEQ ID NO: 1074 - DNA, 768 bp, Artificial Sequence
  HHDH variant
  CDS (1)..(768)
atgagcaccgctattgtcaccaacgtcaaacattttggaggtatgggtagcgctctgcgtctgagcgaagctggtcataccgtcgcttgccatgatgaaagctttaagcatcaggatgaactagaagcttttgctgaaacctacccacagctgataccaatgagcgaacaggaaccagctgaactgattgaagctgtcaccagcgctcttggtcatgtcgatgtcctggtcagcaacgatatcgcgcctgtggaatggcggccaatcgataaatacgctgtcgaggattacagggatgctgtcgaagctctgcagatcaagccatttgctctagtgaatgctgtcgcttcgcaaatgaagaagcgaaagtcggggcacatcatcttcatcacttcggctgccccgttcgggccatggaaggagctctcgacttactcttcggctcgagctggggctagtgcactggccaatgctctttcgaaggagctgggcgagtacaatatcccggtgttcgctatcgctccgaattacctacactcgggggattcgccgtactattacccctctgagccgtggaagacttctccggagcacgtggctcacgtgcgtaaggtgactgctctacaacgactagggactcaaaaagagttgggggaattggtgacgtttttggcatctggctcttgtgattatttgactggccaggtgttttggttggcaggcggctttcccgtcatcgaacgttggcccggcatgcccgaataatga

SEQ ID NO: 1075 - protein, 254 aa, Artificial Sequence
  HHDH variant
MSTAIVTNVKHFGGMGSALRLSEAGHTVACHDESFKHQDELEAFAETYPQLIPMSEQEPAELIEAVTSALGHVDVLVSNDIAPVEWRPIDKYAVEDYRDAVEALQIKPFALVNAVASQMKKRKSGHIIFITSAAPFGPWKELSTYSSARAGASALANALSKELGEYNIPVFAIAPNYLHSGDSPYYYPSEPWKTSPEHVAHVRKVTALQRLGTQKELGELVTFLASGSCDYLTGQVFWLAGGFPVIERWPGMPE

SEQ ID NO: 1076 - DNA, 768 bp, Artificial Sequence
  HHDH variant
  CDS (1)..(768)
atgagcaccgctattgtcaccaacgtcaaacattttggaggtatgggtagcgctctgcgtctgagcgaagctggtcataccgtcgcttgccatgatgaaagctttaagcatcaggatgaactagaagcttttgctgaaacctacccacagctgataccaatgagcgaacaggaaccagctgaactgattgaagctgtcaccagcgctcttggtcatgtcgatgtcctggtcagcaacgatatcgcgcctgtggaatggcggccaatcgataaatacgctgtcgaggattacagggatactgtcgaagctctgcagatcaagccatttgctctagtgaatcaggtcgcttcgcaaatgaagaagcgaaagtcggggcacatcatcttcatcacttcggctgccccgttcgggccatggaaggagctatcgacttactcttcggctcgagctggggctagtgcactagctaatgctctatcgaaggagctaggagagtacaatatcccggtgttcgctatcgctccgaattacctacactcgggggattcgccgtactattacccctctgagccgtggaagacttctccggagcacgtggctcacgtgcgtaaggtgactgctctacaacgactagggactcaaaaagagttgggggaattggtgacgtttttggcatctggctcttgtgattatttgactggccaggtgttttggttggcaggcggctttcccgtcatcgaacgttggcccggcatgcccgaataatga

SEQ ID NO: 1077 - protein, 254 aa, Artificial Sequence; identical to SEQ ID NO: 993
  HHDH variant

SEQ ID NO: 1078 - DNA, 768 bp, Artificial Sequence
  HHDH variant
  CDS (1)..(768)
atgagcaccgctattgtcaccaacgtcaaacattttggaggtatgggtagcgctctgcgtctgagcgaagctggtcataccgtcgcttgccatgatgaaagctttaagcatcaggatgaactagaagcttttgctgaaacctacccacagctgataccaatgagcgaacaggaaccagctgaactgattgaagctgtcaccagcgctcttggtcatgtcgatgtcctggtcagcaacgatatcgcgcctgtggaatggcggccaatcgataaatacgctgtcgaggattacagggatactgtcgaagctctgcagatcaagccatttgctctagtgaatgctgtcgcttcgcaaatgaagaagcgaaagtcggggcacatcatcttcatcacttcggctgccccgttcgggccatggaaggagctatcgacttactcttcggctcgagctggggctagtgcactagctaatgctctatcgaaggagctaggagagtacaatatcccggtgttcgctatcgctccgaattacctgcactcgggggattcgccgtactattacccctctgagccgtggaagacttctccggagcacgtggctcacgtgcgtaagctaactgctctacaacgactagggactcaaaaagagttgggggaattggtgacgtttttggcatctggctcttgtgattatttgactggccaggtgttttggttggcaggcggctttcccgtcatcgaacgttggcccggcatgcccgaataatga

SEQ ID NO: 1079 - protein, 254 aa, Artificial Sequence; identical to SEQ ID NO: 951
  HHDH variant

SEQ ID NO: 1080 - DNA, 768 bp, Artificial Sequence
  HHDH variant
  CDS (1)..(768)
atgagcaccgctattgtcaccaacgtcaaacattttggaggtatgggtagcgctctgcgtctgagcgaagctggtcataccgtcgcttgccatgatgaaagctttaagcatcaggatgaactagaagcttttgctgaaacctacccacagctgataccaatgagcgaacaggaaccagctgaactgattgaagctgtcaccagcgctcttggtcatgtcgatgtcctggtcagcaacgatatcgcgcctgtggaatggcggccaatcgataaatacgctgtcgaggattacagggatactgtcgaagctctgcagatcaagccatttgctctagtgaatgctgtcgcttcgcaaatgaagaagcgagagtcggggcacatcatcttcatcacttcggccgccccgttcgggccatggaaggagctatcgacttactcttcggctcgagctggggctagtgcactagctaatgctctatcgaaggagctaggagagtacaatatcccggtgttcgctatcgctccgaattacctacactcgggggattcgccgtactattacccctctgagccgtggaagacttctccggagcacgtggctcacgtgcgtaagggaactgctctacaacgactagggactcaaaaagagttgggggaattggtgacgtttttggcatctggctcttgtgattatttgactggccaggtgttttggttggcaggcggctttcccgtcatcgaacgttggcccggcatgcccgaataatga

SEQ ID NO: 1081 - protein, 254 aa, Artificial Sequence
  HHDH variant
MSTAIVTNVKHFGGMGSALRLSEAGHTVACHDESFKHQDELEAFAETYPQLIPMSEQEPAELIEAVTSALGHVDVLVSNDIAPVEWRPIDKYAVEDYRDTVEALQIKPFALVNAVASQMKKRESGHIIFITSAAPFGPWKELSTYSSARAGASALANALSKELGEYNIPVFAIAPNYLHSGDSPYYYPSEPWKTSPEHVAHVRKGTALQRLGTQKELGELVTFLASGSCDYLTGQVFWLAGGFPVIERWPGMPE

SEQ ID NO: 1082 - DNA, 768 bp, Artificial Sequence
  HHDH variant
  CDS (1)..(768)
atgagcaccgctattgtcaccaacgtcaaacattttggaggtatgggtagcgctctgcgtctgagcgaagctggtcataccgtcgcttgccatgatgaaagctttaagcatcaggatgaactagaagcttttgctgaaacctacccacagctgacaccaatgagcgaacaggaaccagctgaactgattgaagctgtcaccagcgctcttggtcatgtcgatgtcctggtcagcaacgatatcgcgcctgtggaatggcggccaatcgataaatacgctgtcgaggattacagggatactgtcgaagctctgcagatcaagccatttgctctagtgaatgctgtcgcttcgcaaatgaagaagcgaaagtcggggcacatcatcttcatcacttcggctgccccgttcgggccatggaaggagctatcgacttactcttcggctcgagctggggctagtgcactagctaatgctctatcgaaggagctaggagagtacaatatcccggtgttcgctatcgctccgaattacctacactcgggggattcgccgtactattacccctctgagccgtggaagacttctccggagcacgtggctcacgtgcgtaaggtgactgctctacaacgactaggggatcaaaaagagttgggggaattggtgacgtttttggcatctggctcttgtgattatttgactggccaggtgttttggttggcaggcggctttcccgtcatcgaacgttggcccggcatgcccgaataatga

SEQ ID NO: 1083 - protein, 254 aa, Artificial Sequence
  HHDH variant
MSTAIVTNVKHFGGMGSALRLSEAGHTVACHDESFKHQDELEAFAETYPQLTPMSEQEPAELIEAVTSALGHVDVLVSNDIAPVEWRPIDKYAVEDYRDTVEALQIKPFALVNAVASQMKKRKSGHIIFITSAAPFGPWKELSTYSSARAGASALANALSKELGEYNIPVFAIAPNYLHSGDSPYYYPSEPWKTSPEHVAHVRKVTALQRLGDQKELGELVTFLASGSCDYLTGQVFWLAGGFPVIERWPGMPE

SEQ ID NO: 1084 - DNA, 768 bp, Artificial Sequence
  HHDH variant
  CDS (1)..(768)
atgagcaccgctattgtcaccaacgtcaaacattttggaggtatgggtagcgctctgcgtctgagcgaagctggtcataccgtcgcttgccatgatgaaagctttaagcatcaggatgaactagaagcttttgctgaaacctacccacagctgataccaatgagcgaacaggaaccagctgaactgattgaagctgtcaccagcgctcttggtcatgtcgatgtcctggtcagcaacgatatcgcgcctgtggaatggcggccaatcgataaatacgctgtcgaggattacagggatactgtcgaagctctgcagatcaagccatttgctctagtgaatgctgtcgcttcgcaaatgaagaagcgaaagtcggggcacatcatcttcatcacttcggctgccccgttcgggccatggaaggagctatcgacttactcttcggctcgagctggggctagtgcactagctaatgctctatcgaaggagctaggagagtacaatatcccggtgttcgctatcgctccgaattacctacactcgggggattcgccgtactattacccctctgagccgtggaagacttctccggagcacgtggctcacgtgcgtaaggcgactgctctacaacgactagggactcaaaaagagttgggggaattggtgacgtttttggcatctggctcttgtgattacttgactggccaggtgttttggttggcaggcggctttcccgtcatcgaacgttggcccggcatgcccgaataatga

SEQ ID NO: 1085 - protein, 254 aa, Artificial Sequence; identical to SEQ ID NO: 1063
  HHDH variant

SEQ ID NO: 1086 - DNA, 768 bp, Artificial Sequence
  HHDH variant
  CDS (1)..(768)
atgagcaccgctattgtcaccaacgtcaaacattttggaggtatgggtagcgctctgcgtctgagcgaagctggtcataccgtcgcttgccatgatgaaagctttaagcatcaggatgaactagaagcttttgctgaaacctacccacagctgataccaatgagcgaacaggaaccagctgaactgattgaagctgtcaccagcgctcttggtcatgtcgatgtcctggtcagcaacgatatcgcgcctgtggaatggcggccaatcgataaatacgctgtcgaggattacagggatcaggtcgaagctctgcagatcaagccatttgctctagtgaatgctgtcgcttcgcaaatgaagaagcgaaagtcggggcacatcatcttcatcacttcggctgccccgttcgggccatggaaggagctatcgacttactcttcggctcgagctggggctagtgcactagctaatgctctatcgaaggagctaggagagtacaatatcccggtgttcgctatcgctccgaattacctacactcgggggattcgccgtactattacccctctgagccgtggaagacttctccggagcacgtggctcacgtgcgtaaggtgactgctctacaacgactagggactcaaaaagagttgggggaattggtgacgtttttggcatctggctcttgtgattatttgactggccaggtgttttggttggcaggcggcttccccgtcatcgaacgttggcccggcatgcccgaataatga

SEQ ID NO: 1087 - protein, 254 aa, Artificial Sequence; identical to SEQ ID NO: 949
  HHDH variant

SEQ ID NO: 1088 - DNA, 768 bp, Artificial Sequence
  HHDH variant
  CDS (1)..(768)
atgagcaccgctattgtcaccaacgtcaaacattttggaggtatgggtagcgctctgcgtctgagcgaagctggtcataccgtcgcttgccatgatgaaagctttaagcatcaggatgaactagaagcttttgctgaaacctacccacagctgataccaatgagcgaacaggaaccagctgaactgattgaagctgtcaccagcgctcttggtcatgtcgatgtcctggtcagcaacgatatcgcgcctgtggaatggcggccaatcgataaatacgctgtcgaggattacagggatactgtcgaagctctgcagatcaagccatttgctctagtgaatgctgtcgcttcgcaaatgaagaagcgaaagtcggggcacatcatcttcatcacttcggctgccccgttcgggccatggaaggagctatcgacttactcttcggctcgagctggggctagtgcactagctaatgctctatcgaaggagctaggagagtacaatatcccggtgttcgctatcgctccgaattacctacacacgggggattcgccgtactattacccctctgagccgtggaagacttctccggagcacgtggctcacgtgcgtaaggtgactgctctacaacgactagggactcaaaaagagttgggggaattggtgacgtttttggcatctggctcttgtgattatttgactggccaggtgttttggttggcaggcggctttcccgtcatcgaacgttggcccggcatgcccgaataatga

SEQ ID NO: 1089 - protein, 254 aa, Artificial Sequence; identical to SEQ ID NO: 923
  HHDH variant

SEQ ID NO: 1090 - DNA, 768 bp, Artificial Sequence
  HHDH variant
  CDS (1)..(768)
atgagcaccgctattgtcaccaacgtcaaacattttggaggtatgggtagcgctctgcgtctgagcgaagctggtcataccgtcgcttgccatgatgaaagctttaagcatcaggatgaactagaagcttttgctgaaacctacccacagctgataccaatgagcgaacaggaaccagctgaactgattgaagctgtcaatagcgctcttggtcatgtcgatgtcctggtcagcaacgatatcgcgcctgtggaatggcggccaatcgataaatacgctgtcgaggattacagggatactgtcgaagctctgcagatcaagccatttgctctagtgaatgctgtcgcttcgcaaatgaagaagcgaaagtcggggcacatcatcttcatcacttcggctgccccgttcgggccatggaaggagctatcgacttactcttcggctcgagctggggctagtgcactagctaatgctctatcgaaggagctaggagagtacaatatcccggtgttcgctatcgctccgaattacctacactcgggggattcgccgtactattacccctctgagccgtggaagacttctccggagcacgtggctcacgtgcgtaaggtgactgctctacaacgactagggactcaaaaagagttgggggaattggtgacgtttttggcatctggctcttgtgattatttgactggccaggtgttttggttggcaggcggctttcccgtcatcgaacgttggcccggcatgcccgaataatga

SEQ ID NO: 1091 - protein, 254 aa, Artificial Sequence
  HHDH variant
MSTAIVTNVKHFGGMGSALRLSEAGHTVACHDESFKHQDELEAFAETYPQLIPMSEQEPAELIEAVNSALGHVDVLVSNDIAPVEWRPIDKYAVEDYRDTVEALQIKPFALVNAVASQMKKRKSGHIIFITSAAPFGPWKELSTYSSARAGASALANALSKELGEYNIPVFAIAPNYLHSGDSPYYYPSEPWKTSPEHVAHVRKVTALQRLGTQKELGELVTFLASGSCDYLTGQVFWLAGGFPVIERWPGMPE

SEQ ID NO: 1092 - DNA, 768 bp, Artificial Sequence
  HHDH variant
  CDS (1)..(768)
atgagcaccgctattgtcaccaacgtcaaacattttggaggtatgggtagcgctctgcgtctgagcgaagctggtcataccgtcgcttgccatgatgaaagctttaagcatcaggatgaactagaagcttttgctgaaacctacccacagctgataccaatgagcgaacaggaaccagctgaactgattgaagctgtcaccagcgctcttggtcatgtcgatgtcctggtcagcaacgatatcgcgcctgtggaatggcggccaatcgataaatacgctgtcgaggattacagggatactgtcgaagctctgcagatcaagccatttgctctagtgaatgctgtcgcttcgcaaatgaagaagcgaaagtcggggcacatcatcttcatcacttcggctgccccgttcgggccatggaaggagctatcgacttactcttcggctcgagctggggctagtgcactagctaatgctctatcgaaggagctaggagagtacaatatcccggtgttcgctatcgctccgaattacctacactcgggggattcgccgtactattacccctctgagccgtggaagacttctccggagcacgtggctcacgtgcgtaaggtgactgctctacaacgactagggactcaaaaagagttgggggaattggtgacgtttttggcatctggctcttgtgattatttgactggccaggtgttttggttgacgggcggctttcccgtcatcgaacgttggcccggcatgcccgaataatga

SEQ ID NO: 1093 - protein, 254 aa, Artificial Sequence
  HHDH variant
MSTAIVTNVKHFGGMGSALRLSEAGHTVACHDESFKHQDELEAFAETYPQLIPMSEQEPAELIEAVTSALGHVDVLVSNDIAPVEWRPIDKYAVEDYRDTVEALQIKPFALVNAVASQMKKRKSGHIIFITSAAPFGPWKELSTYSSARAGASALANALSKELGEYNIPVFAIAPNYLHSGDSPYYYPSEPWKTSPEHVAHVRKVTALQRLGTQKELGELVTFLASGSCDYLTGQVFWLTGGFPVIERWPGMPE

SEQ ID NO: 1094 - DNA, 768 bp, Artificial Sequence
  HHDH variant
  CDS (1)..(768)
atgagcaccgctattgtcaccaacgtcaaacattttggaggtatgggtagcgctctgcgtctgagcgaagctggtcataccgtcgcttgccatgatgaaagctttaagcatcaggatgaactagaagcttttgctgaaacctacccacagctgataccaatgagcgaacaggaaccagctgaactgattgaagctgtcaccagcgctcttggtcatgtcgatgtcctggtcagcaacgatatcgcgcctgtggaatggcggccaatcgataaatacgctgtcgcggattacagggatactgtcgaagctctgcagatcaagccatttgctctagtgaatgctgtcgcttcgcaaatgaagaagcgaaagtcggggcacatcatcttcatcacttcggctgccccgttcgggccatggaaggagctatcgacttactcttcggctcgagctggggctagtgcactagctaatgctctatcgaaggagctaggagagtacaatatcccggtgttcgctatcgctccgaattacctacactcgggggattcgccgtactattacccctctgagccgtggaagacttctccggagcacgtggctcacgtgcgtaaggtgactgctctacaacgactagggactcaaaaagagttgggggaattggtgacgtttttggcatctggctcttgtgattatttgactggccaggtgttttggttggcaggcggctttcccgtcatcgaacgttggcccggcatgcccgaataatga

SEQ ID NO: 1095 - protein, 254 aa, Artificial Sequence
  HHDH variant
MSTAIVTNVKHFGGMGSALRLSEAGHTVACHDESFKHQDELEAFAETYPQLIPMSEQEPAELIEAVTSALGHVDVLVSNDIAPVEWRPIDKYAVADYRDTVEALQIKPFALVNAVASQMKKRKSGHIIFITSAAPFGPWKELSTYSSARAGASALANALSKELGEYNIPVFAIAPNYLHSGDSPYYYPSEPWKTSPEHVAHVRKVTALQRLGTQKELGELVTFLASGSCDYLTGQVFWLAGGFPVIERWPGMPE

SEQ ID NO: 1096 - DNA, 768 bp, Artificial Sequence
  HHDH variant
  CDS (1)..(768)
atgagcaccgctattgtcaccaacgtcaaacattttggaggtatgggtagcgctctgcgtctgagcgaagctggtcataccgtcgcttgccatgatgaaagctttaagcatcaggatgaactagaagcttttgctgaaacctacccacagctgataccaatgagcgaacaggaaccagctgaactgattgaagctgtcaccagcgctcttggccatgtcgatgtcctggtcagcaacgatatcgcgcctgtggaatggcggccaatcgataaatacgctgtcgaggattacagggatactgtcgaagctctgcagatcaagccatttgctctagtgaatgctgtcgcttcacaaatgaagaagcgaaagtcggggcacatcatcttcatcacttcggctgccccgttcgggccatggaaggagctatcgacttactcttcggctcgagctggggctagtgcactagctaatgctctatcgaaggagctaggagagtacaatatcccggtgttcgctatcgctccgaattacatgcactcgggggattcgccgtactattacccctctgagccgtggaagacttctccggagcacgtggctcacgtgcgtaaggtgactgctctacaacgactagggactcaaaaagagttgggggaattggtgacgtttttggcatctggctcttgtgattatttgactggccaggtgttttggttggcaggcggctttcccgtcatcgaacgttggcccggcatgcccgaataatga

SEQ ID NO: 1097 - protein, 254 aa, Artificial Sequence; identical to SEQ ID NO: 884
  HHDH variant

SEQ ID NO: 1098 - DNA, 768 bp, Artificial Sequence
  HHDH variant
  CDS (1)..(768)
atgacaaccgctattgtcaccaacgtcaaacattttggaggtatgggtagcgctctgcgtctgagcgaagctggtcataccgtcgcttgccatgatgaaagctttaagcatcaggatgaactagaagcttttgctgaaacctacccacagctgataccaatgagcgaacaggaaccagctgaactgattgaagctgtcaccagcgctcttggtcatgtcgatgtcctggtcagcaacgatatcgcgcctgtggaatggcggccaatcgataaatacgctgtcgaggattacagggatactgtcgaagctctgcagatcaagccatttgctctagtgaatgctgtcgcttcgcaaatgaagaagcgaaagtcggggcacatcatcttcatcacttcggctgccccgttcgggccatggaaggagctatcgacttactcttcggctcgagctggggctagtgcactagctaatgctctatcgaaggagctaggagagtacaatatcccggtgttcgctatcgctccgaattacctacactcgggggattcgccgtactattacccctctgtgccgtggaagacttctccggagcacgtggctcacgtgcgtaaggtgactgctctacaacgactagggactcaaaaagagttgggggaattggtgacgtttttggcatctggctcttgtgattatttgactggccaggtgttttggttggcaggcggctttcccgtcatcgaacgttggcccggcatgcccgaataatga

SEQ ID NO: 1099 - protein, 254 aa, Artificial Sequence
  HHDH variant
MTTAIVTNVKHFGGMGSALRLSEAGHTVACHDESFKHQDELEAFAETYPQLIPMSEQEPAELIEAVTSALGHVDVLVSNDIAPVEWRPIDKYAVEDYRDTVEALQIKPFALVNAVASQMKKRKSGHIIFITSAAPFGPWKELSTYSSARAGASALANALSKELGEYNIPVFAIAPNYLHSGDSPYYYPSVPWKTSPEHVAHVRKVTALQRLGTQKELGELVTFLASGSCDYLTGQVFWLAGGFPVIERWPGMPE

SEQ ID NO: 1100 - DNA, 768 bp, Artificial Sequence
  HHDH variant
  CDS (1)..(768)
atgagcaccgctattgtcaccaacgtcaaacattttggaggtatgggtagcgctctgcgtctgagcgaagctggtcataccgtcgcttgccatgatgaaagctttaagcatcaggatgaactagaagcttttgctgaaacctacccacagctgataccaatgagcgaacaggaaccagctgaactgattgaagctgtcaatagcgctcttggtcatgtcgatgtcctggtcagcaacgatatcgcgcctgtggaatggcggccaatcgataaatacgctgtcgaggattacagggatactgtcgaagctctgcagatcaagccatttgctctagtgaatgctgtcgcttcgcaaatgaagaagcgaaagtcggggcacatcatcttcatcacttcggctgccccgttcgggccatggaaggagctatcgacttactcttcggctcgagctggggctagtgcactagctaatgctctatcgaaggagctaggagagtacaatatcccggtgttcgctatcgctccgaattacctacactcgggggattcgccgtactattacccctctgagccgtggaagacctctccggagcacgtggctcacgtgcgtaaggtgactgctctacaacgactagggactcaaaaagagttgggggaattggtgacgtttttggcatctggctcttgtgattatttgactggccaggtgttttggttggcaggcggctttcccgtcatcgaacgttggcccggcatgcccgaataatga

SEQ ID NO: 1101 - protein, 254 aa, Artificial Sequence; identical to SEQ ID NO: 1091
  HHDH variant

SEQ ID NO: 1102 - DNA, 768 bp, Artificial Sequence; identical to SEQ ID NO: 747
  HHDH variant
  CDS (1)..(768)

SEQ ID NO: 1103 - protein, 254 aa, Artificial Sequence; identical to SEQ ID NO: 748
  HHDH variant

SEQ ID NO: 1104 - DNA, 768 bp, Artificial Sequence; identical to SEQ ID NO: 747
  HHDH variant
  CDS (1)..(768)

SEQ ID NO: 1105 - protein, 254 aa, Artificial Sequence; identical to SEQ ID NO: 748
  HHDH variant

SEQ ID NO: 1106 - DNA, 768 bp, Artificial Sequence
  HHDH variant
  CDS (1)..(768)
atgagcaccgctattgtcaccaacgtcaagcattttggaggtatgggtagcgctctgcgtctgagcgaagctggtcataccgtcgcttgccatgatgaaagctttaagcatctggatgaactagaagcttttgctgaaacctacccacagctgataccaatgagcgaacaggaaccagctgaactgattgaagctgtcaatagcgcccttggtcatgtcgatatcctggtcagcaacgatatcgcgcctgtggaatggcggccaatcgataaatacgctgtcgaggattacagggatactgtcgaagctctgcagatcaagccatttgctctagcaaatgccgtcgcttcgcaaatgaaggatcgaaagtcggggcacatcatcttcatcacttcggctgctccgttcgggccatggaaggagctatcgacttactcttcggctcgagctgggaccagtgcactagctaatgctctatcgaaggagctaggagagtacaatatcccggtgttcgctatcgctccgaactgtttggactcgggggattcgccgtactattacccctctgagccgtggaagacttctccggagcacgcggctcacgtgcgtaagtacactgctctacaacgactagggactcaaaaagagttgggggaattggtgacgtttttggcatctggctcttgtgattatttgactggccaggtgttttgtttggcaggcggctttcccgttgtagagcgttggcccgatatgcccgaataatga

SEQ ID NO: 1107 - protein, 254 aa, Artificial Sequence
  HHDH variant
MSTAIVTNVKHFGGMGSALRLSEAGHTVACHDESFKHLDELEAFAETYPQLIPMSEQEPAELIEAVNSALGHVDILVSNDIAPVEWRPIDKYAVEDYRDTVEALQIKPFALANAVASQMKDRKSGHIIFITSAAPFGPWKELSTYSSARAGTSALANALSKELGEYNIPVFAIAPNCLDSGDSPYYYPSEPWKTSPEHAAHVRKYTALQRLGTQKELGELVTFLASGSCDYLTGQVFCLAGGFPVVERWPDMPE

SEQ ID NO: 1108 - DNA, 768 bp, Artificial Sequence; identical to SEQ ID NO: 747
  HHDH variant
  CDS (1)..(768)

SEQ ID NO: 1109 - protein, 254 aa, Artificial Sequence; identical to SEQ ID NO: 748
  HHDH variant

SEQ ID NO: 1110 - DNA, 768 bp, Artificial Sequence; identical to SEQ ID NO: 747
  HHDH variant
  CDS (1)..(768)

SEQ ID NO: 1111 - protein, 254 aa, Artificial Sequence; identical to SEQ ID NO: 748
  HHDH variant

SEQ ID NO: 1112 - DNA, 768 bp, Artificial Sequence
  HHDH variant
  CDS (1)..(768)
atgagcaccgctattgtcaccaacgtcaagcattttggaggtatgggtagcgctctgcgtctgagcgaagctggtcataccgtcgcttgccatgatgaaagctttaagcatctggatgaactagaagcttttgctgaaacctacccacagctgataccaatgagcgaacaggaaccagctgaactgattgaagctgtcaatagcgcccttggtcatgtcgatatcctggtcagcaacgatatcgcgcctgtggaatggcgcccaatcgataaatacgctgtcgaggattacagggatactgtcgaagctctgcagatcaagccatttgctctagcaaatgccgtcgcttcgcaaatgaaggatcgaaagtcggggcacatcatcttcatcacttcggctgccccgttcgggccatggaaggagctatcgacttactcttcggctcgagctgggaccagtgcactagctaatgctctatcgaaggagctaggagagtacaatatcccggtgttcgctatcgctccgaacgccctagactcgggggattcgccgtactattacccctctgagccgtggaagacttctccggagcacgtggctcacgtgcgtaagtacactgctctacaacgactagggactcaaaaagagttgggggaattggtgacgtttttggcatctggctcttgtgattatttgactggccaggtgttttgtttggcaggcggctttcccgttgtagagcgttggcccggcatgcccgaataatga

SEQ ID NO: 1113 - protein, 254 aa, Artificial Sequence; identical to SEQ ID NO: 748
  HHDH variant

SEQ ID NO: 1114 - DNA, 768 bp, Artificial Sequence; identical to SEQ ID NO: 747
  HHDH variant
  CDS (1)..(768)

SEQ ID NO: 1115 - protein, 254 aa, Artificial Sequence; identical to SEQ ID NO: 748
  HHDH variant

SEQ ID NO: 1116 - DNA, 768 bp, Artificial Sequence; identical to SEQ ID NO: 747
  HHDH variant
  CDS (1)..(768)

SEQ ID NO: 1117 - protein, 254 aa, Artificial Sequence; identical to SEQ ID NO: 748
  HHDH variant

SEQ ID NO: 1118 - DNA, 768 bp, Artificial Sequence; identical to SEQ ID NO: 747
  HHDH variant
  CDS (1)..(768)

SEQ ID NO: 1119 - protein, 254 aa, Artificial Sequence; identical to SEQ ID NO: 748
  HHDH variant

SEQ ID NO: 1120 - DNA, 768 bp, Artificial Sequence; identical to SEQ ID NO: 747
  HHDH variant
  CDS (1)..(768)

SEQ ID NO: 1121 - protein, 254 aa, Artificial Sequence; identical to SEQ ID NO: 748
  HHDH variant

SEQ ID NO: 1122 - DNA, 768 bp, Artificial Sequence; identical to SEQ ID NO: 747
  HHDH variant
  CDS (1)..(768)

SEQ ID NO: 1123 - protein, 254 aa, Artificial Sequence; identical to SEQ ID NO: 748
  HHDH variant

SEQ ID NO: 1124 - DNA, 768 bp, Artificial Sequence; identical to SEQ ID NO: 747
  HHDH variant
  CDS (1)..(768)

SEQ ID NO: 1125 - protein, 254 aa, Artificial Sequence; identical to SEQ ID NO: 748
  HHDH variant

SEQ ID NO: 1126 - DNA, 768 bp, Artificial Sequence; identical to SEQ ID NO: 747
  HHDH variant
  CDS (1)..(768)

SEQ ID NO: 1127 - protein, 254 aa, Artificial Sequence; identical to SEQ ID NO: 748
  HHDH variant

SEQ ID NO: 1128 - DNA, 768 bp, Artificial Sequence; identical to SEQ ID NO: 747
  HHDH variant
  CDS (1)..(768)

SEQ ID NO: 1129 - protein, 254 aa, Artificial Sequence; identical to SEQ ID NO: 748
  HHDH variant

SEQ ID NO: 1130 - DNA, 768 bp, Artificial Sequence; identical to SEQ ID NO: 747
  HHDH variant
  CDS (1)..(768)

SEQ ID NO: 1131 - protein, 254 aa, Artificial Sequence; identical to SEQ ID NO: 748
  HHDH variant

SEQ ID NO: 1132 - DNA, 768 bp, Artificial Sequence
  HHDH variant
  CDS (1)..(768)
atgagcaccgctattgtcaccaacgtcaagcattttggaggtatgggtagcgctctgcgtctgagcgaagctggtcataccgtcgcttgccatgatgaaagctttaagcatctggatgaactagaagcttttgctgaaacctacccacagctgataccaatgagcgaacaggaaccagctgaactgattgaagctgtcaatagcgcccttggtcatgtcgatatcctggtcagcaacgatatcgcgcctgtggaatggcggccaatcgataaatacgctgtcgaggattacagggatactgtcgaagctctgcagatcaagccatttgctctagcaaatgccgtcgcttcgcaaatgaaggatcgaaagtcggggcacatcatcttcatcacttcggctgccccgttcgggccatggaaggagctatcgacttactcttcggctcgagctgggaccagtgcactagctaatgctctatcgaaggagctaggagagtacaatatcccggtgttcgctatcgctccgaacgccctagactcgggggattcgccgtactattacccctctgagccgtggaagacttctccggagcacgtggctcacgtgcgtaagtacactgctctacaacgactagggactcaaaaagagttgggggaattggtgacgtttttggcatctggctcctgtgattatttgactggccaggtgttttgtttggcaggcggctttcccgttgtagagcgttggcccggcatgcccgaataatga

SEQ ID NO: 1133 - protein, 254 aa, Artificial Sequence; identical to SEQ ID NO: 748
  HHDH variant

SEQ ID NO: 1134 - DNA, 768 bp, Artificial Sequence; identical to SEQ ID NO: 747
  HHDH variant
  CDS (1)..(768)

SEQ ID NO: 1135 - protein, 254 aa, Artificial Sequence; identical to SEQ ID NO: 748
  HHDH variant

SEQ ID NO: 1136 - DNA, 768 bp, Artificial Sequence; identical to SEQ ID NO: 747
  HHDH variant
  CDS (1)..(768)

SEQ ID NO: 1137 - protein, 254 aa, Artificial Sequence; identical to SEQ ID NO: 748
  HHDH variant

SEQ ID NO: 1138 - DNA, 768 bp, Artificial Sequence
  HHDH variant
  CDS (1)..(768)
atgagcaccgctattgtcaccaacgtcaagcattttggaggtatgggtagcgctctgcgtctgagcgaagctggtcataccgtcgcttgccatgatgaaagctttaagcatctggatgaactagaagcttttgctgaaacctacccacagctgataccaatgagcgaacaggaaccagctgaactgattgaagctgtcaatagcgcccttggtcatgtcgatatcctggtcagcaacgatatcgcgcctgtggaatggcggccaatcgataaatacgctgtcgaggattacagggatactgtcgaagctctgcagatcaagccatttgctctagcaaatgccgtcgcttcgcaaatgaaggatcgaaagtcggggcacatcatcttcatcacttcggctgccccgttcgggccatggaaggagctatcgacttactcttcggctcgagctgggaccagtgcactagctaatgctctatcgaaggagctaggagagtacaatatcccggtgttcgctatcgctccgaacgccctagactcgggggattcgccgtactattacccctctgagccgtggaagacttctccggagcacgtggctcacgtgcgtaagtacactgctctacaacgactagggactcaaaaagagttgggggaattggtgacgtttttggcatctggctcttgtgattatttgactggccaggtgttttgtttggcaggcggctttcccgttgtagagcgttggcccgatatgcccgaataatga

SEQ ID NO: 1139 - protein, 254 aa, Artificial Sequence
  HHDH variant
MSTAIVTNVKHFGGMGSALRLSEAGHTVACHDESFKHLDELEAFAETYPQLIPMSEQEPAELIEAVNSALGHVDILVSNDIAPVEWRPIDKYAVEDYRDTVEALQIKPFALANAVASQMKDRKSGHIIFITSAAPFGPWKELSTYSSARAGTSALANALSKELGEYNIPVFAIAPNALDSGDSPYYYPSEPWKTSPEHVAHVRKYTALQRLGTQKELGELVTFLASGSCDYLTGQVFCLAGGFPVVERWPDMPE

SEQ ID NO: 1140 - DNA, 768 bp, Artificial Sequence; identical to SEQ ID NO: 747
  HHDH variant
  CDS (1)..(768)

SEQ ID NO: 1141 - protein, 254 aa, Artificial Sequence; identical to SEQ ID NO: 748
  HHDH variant

SEQ ID NO: 1142 - DNA, 768 bp, Artificial Sequence; identical to SEQ ID NO: 747
  HHDH variant
  CDS (1)..(768)

SEQ ID NO: 1143 - protein, 254 aa, Artificial Sequence; identical to SEQ ID NO: 748
  HHDH variant
